United States Patent Application Publication US 2026/0058010 A1 - sequence listing, part 35

SEQ ID NO: 415 - DNA, 322008 bp, Homo sapiens
  source 1..322008: mol_type = genomic DNA
ttctgaagtggattttcagagacacagttagaaggtgtgcttcactgctttattctgcatatgccccaatgaattccaggaggtcacagcagcagagtacaacttttaagattagaagagcttgctctttaaagagttatttttagctggaagggagagtgtagacctcaaagtgctggtaggtatgttctacagtggggatctaatttggaggtctttggagatctgattccaggggaaggtctcagtggggctcctcttgcctctgctgcaggactgggtggctctgctgattgtcactgccttgtttgaggggtggtctccatcatccaggggaattcagcctgggacctattgtctagagtgtacattgtatctaggcccagacctgccagagtgtccacagccacacttgaggaaaggacattccagactcattaaatatcacaattcgattttgatgtcactaactcaggttcctgagataaatttccatacaattcctacagattgatatggatatgtgcatcaccccaggagaggctctggtgaagggcaggcttggagatgcaatgggcaaggttggggaagagataccctcttccgggttccgatttgtgccctgaatttgggcaagctcaaggagcactggcaaccccaccagcaccagaagaagctggtcctggctgtctcccgagactggtgaaactgctctggtggtggtgcactggaagggtggaggaaaaaaaacaaaaaacaaaacagggtttgagggggaatggcagggacacggtagaggcacagagatacagagacctagagtcagaaatcctgagtgagacacacagaaaggcagaaaaaggcagaaagatgctgagggacagagacgcagaccacaagaatgacagaagaaggagacagagagagagagggagtgagaaagatactgagaaatagggacagtaagggagagactgagaaagacagagacagccagagtcggagcacagaggccgagtctgggagacgctggttgagtgggaggtgtcagtagcgagggaggtggtgacggctcgaagcatcccccgtcctcctcctcccccttcacgctcagcccagccggcggcgaggagtccagaggccaaggtcgcccagtcctctcggctgtctcgagctgaatggctggcagtctgcggctcccccgcctccggcccggcagccacaggtcggaggcgcccggcgtcggcgctcgaggccggcaggggcgccctgcaccctcccgcgcccttccccgccctacgcgactcccggctgctcttcccgccactcccctgggctttgcgatcttccctacgccccccgggaagggggcgctgcggccaccgaagacaccgcgggagccacttgtccctgtgggcccagcccgcgagagcctgagagccggatctgtttacacagggtactaattagtctttgaggaatcattcacccacgtgccaaagtaattgtccgtgtcaggaaggtaggcgtgccaagccgcggctctgcggagaaaccacgaccaccgcggccgccggaaacccaaagcgctccagagcgtccccgggtggccgggcagcaccagggacagcgcccgggactccactggggaccggctcctgggcttcccagcgtcgcgggtagaggtacagctgctccgtgtgccgcaggctccagattctcgccaccccacccctccctcagaaactcggactgctctcgtctgccgtgtggttctcttttcttccgaaaggccagtgtcttatctctccacttcaagtccagaggacttgctcagtctcctccccttaagtcatttccaccatcctcaggcagctgtgggaagccgagagtcctggactgttcgtccgggtgccagcgctggcagtcccagtccgtccggtgcagcagcccggcgcattcccctctctccctccctcttgctctccctccctttctgtcttcctctctttcctcctctactgctccctccctctcttgcctcttaagtttcctgcaccgtgaatccaactgtgccaagccttggctcccgcgaaccaatcctgagcgcgacccgggcactgggacggcgactccgccaaagctggacgaggcagccggacccgtctgcgctcgagcatggagacggagcgcctgggagggcacgtccggggcgctggagacgccaggcccgagtagcttctccatggagcctgcccagagcggtcccttctcgcaggattcgccccaagtcctgtgcggtacgtaccctttgcctccgctgttcccggagggtacacctgggagcggggtggtgggcacgaggaagggacggcagggaggggcgctggttaggaaagagaacaagcctggcaggtgaccctcacagctcggaggaggcttcttctctagaagttagcgaccggctgtaccctttggctcgaaaaaagtagtgctagagatgtgactgtgagcattcgtgggtatctctgtgtgcgccaggggttcgaatgggtaaactgatccctgctttcctgtatgcaaattgcattctctttccccacccccacttcaccgaacgtgttgaggtacctagcacctaatcgcggtcagttctacctacctcttcctctcaccgcgcccccctcgctcaatctctctctctccctttatctttcccctctatctctctctgctggtgtgtacgtgtgtgagcactgccagggctggcgaagaaccagccgccgcctttagtccgagccgccgggccacccaacacaagggcaggtctcgctgccggagaagcctgggctccgaaccagcctgcacgcggctcagtgtgctccgccgcctgggaactcgcacccgaggagcgcagggggcaaggagcccctcaccctccctctcgtccgcccgcccgcctccccagctgcggaccgcgcgcttgctggtctcaggcgctggatttactcgcttttcaatttttcgtaccctccctcccttttttttttggtcccccactccccgctacgaccccctttccccgcttgattgtcaagcctaaccttgcccgcgtagtcatgggatgtctaattttatttgcatctaggctgctgagagcgctccttgctctgtaaagtggatgtcaggtggatctatgtttctgaaggaacaaagactcaaagaaggcaccgccaaggaagtttgagacgcgggagaatgcaggctgcgtgctggtacgtgcttttcctcctgcagcccaccgtctacttggtaagtcttggaaggttcggggctttcgcatttttaccccggccgggaggcaaggaaactggggacacgcgggagaagggttacgccgccagttcagtgagagcagcttcctagcagctgtgttggagcaactttggcaagctggtctctggattcctgcggattttccggggttcccaccccattttctgctccaatcccccagtctcctgcgcgtgattcttgaaaggggctagggcgccccagacaccctaaacccaaggaggtagtgagatggggtgctttatgtgatagagggccaacgagaagaagtggaaggcaggaactctcagtagctcatgcacagagtttaaacgaagggaagtgggggtgtagttgggtggtggaaagaacaaatctgcccaggtctgtgagtttaaaagtgaatctacccacccacttccccgatttggagatgagacacataaagaagcgcagttaactttctttgacttgtaagggttccgacaggataagtttaactatcaggggtactgcaagcaatcggagttaggacagagatactccagcaaacatgtccaccttcctctcgtctcgacctccccttttcatcaaataactaaatcccatctccagtgactagtccattattagggaatggtaggccttgtcgccagggagagaattctaaacaaagccgcggtccttgtccttcagtagcagagttttccggggggctggactttgtacactgctggaactcggctcctggttgaagagctttgttgtggtgaattggtagctgtttgtgccatgttgagacaaggagaatgagatatttcaggtctggcttctggggtgggaatgggggaatgggggtaagggacacttgtgccctgctggtgaagttgtgttcagtgtcccgacccccatagcccatcctgggctgcgggagtgcaccgagggctcgctatgttctgtctaggggtgaggtgcgctaaagcagcccgaactctctgatgggctacacctctgattggaggtgatactggcgctcctcaatcccaagagccttagatagaacccataagcctgaaagaattgccatccctacaattgacagcgtttctcggccgttgccctggtgcatgtggctgcaaagctgcgagttgtgtgaattctgtgtatgtgagtgacacgtatatatatgtgtgtgtgaatgtgtatttaaccgatttcagcttcaatccaagaaccctcaatgttgcctgtctttgcccctttatcgcctgaccgtagcagccgcggacgccagagggcgctgcgcatcagcgtcctcgcccacaggacaccttggggtaaacaggtgaaagccagggcagccaatccaaaagaacagcctttctgactctgtcaccgaagtctgtgcctttacccgctggaacgcaggcggaatgcaaaaagtgtccttcccatttcccatcttcaatcattttcacccccacctgtgttcagtaagcccactgacattgagagaccatggatggagggcagaaagtttggccagaagaaatatagaatttttttattgagagatggggggagggaatgcaaagtgaaagcgacgggggcgggggggaggtaattttaaggattcccttgaccatcgtaacccgcttgcccttttcctctgcatacctttacgcctgacctgaacttgaggactgttcttacgtccttgggctgtgctcacacacacggcaagggcttgtggctatggtgcagtttattgcttggagcaagtatttcgatagtctggaaaataatctatcaaaagcagaagtgaaatcaatactttgtgttaaattttaaatgtgtttgttggcagttaaaccgttttccactcattacaacaacagtgctggatttattctaatgcgctgcgttctcaacaacaagcgcattaattctcctttaattgtaaactgggagcatttgaaaaccattcagtgtgcaaattatgctgattcaattaccgtttagttacagacttcattacctgaatgccttttggcaatacagagaaaggagacaatttttccaatttcactcaaaacaatacgaaatgtgaacaataaaatagagaaggctatttagaagtccgttcttttttctccaatctaaagtacttttgtgtgtcggggactagaaaccacatgcaccacaaaaactacagctgatggctgtgacccaaggcagtatttccagggattgtaatcccatggatatttgccagcagaattccgagctgttttcctgaaggagcaaaaagctgacttctaccatggaaatgaatttaaaagggtgaattgggcagtcatttcgggatggttttaggcaaataaagaagtagagagccttgattaaaactctagggcaatgaaccgatcaagaagtgatcaaggcttctttcttcatctatttcattaaataccagatacagttaactggattgatcatttgtttgtagctgcacattggaagatcttatccctttgtaagaacctgcactggatgcatacagattgtcaggagctgctttaagttacattcaaagaaggcaagagtggcaaaaccattattttaattttctcttgaactgacataagccagggaagaatttgatggataatttttgtctttgtgagctcacaccactagttaagtgcctgcatcactctgtttatgccttacctcttagctgatatctcagtgcaccttgacctttaagcccatggtatcctagttatgtttcccagggagtaatcaccacattaagtccatgaaacaagacttgtctagttatctcctaaagaaatatttaggcttctgtttaaagtgaataccttaaatacccccaaatttgagaataacttcttatgaaaactctgcagtaggtcaatgccccacaccaagccacagtttcctacctgtatttgggtgaatgtttgcaaagtatgtttctgggcccgggattctttgaatgctttaggttgaggatttttgtgttttttgagagacaagtctgtcctagttcaaaatagaagcttattttagtactttaatgggaaactaattagatatgtgcccacagagttaccttctgaagcatgttagctggaatactcaaaatccaccacaggacaagctccagccataaatgcatgggggtgggaaactaacttttaaaaataaaggtaaataaaatttcagactattgaatgttatgtattgcagatttaaaagcctgaattcaataggagagaagtctatggttaacaacgcttattaaaaataataaaaaagttttgcaatctttattctcttattattcctggaccaattccaggatattttcagtatgatacaatgggatggcaggatgatagcattttaactttattgaagcatatattgaatcagctagaaaaatatggttccttgctctgaagagtgggggttctaacttgaatcagcctcattggatcaagtagaaggataggccaggacaccaggaaagcatctcccacagggtgtggcattctgtttgggggctcacctgtggtaactctcagttagagaggtgagtctaatgagcactttctgagcatgctaatgaaaaagctactcagaaattgaatccaatgcatccgacaaggcattgtataaagttactgtgactagtcacccatccacagctctattctaatgagaaggggtcccaccatttctgctaggaattaaattgctaataatcaagttgctttttaaatcaaaataggcatgaattaaaaatcctttctaaacttgtgccacattatgagccatctattctctcaaatttgggatatccttaaaatgtgaattctacaccaattgtttaatagagtttggagagtaattaatgtatctatgggaccactacctctgcactgttaaaagctagatcatttgggtgaaatccactcattatgaagatggctgttaaggtatattggagctgggggaaaagcagagggagagagaccagcaatgtcttttctttggactaggtatgtgtgcttctcattctttaaaaattaagccagctgcacactgaaaattctaatcaatttgagcttattactgaaaataaacaaaataaaataaatttcctgacagtggctattaagtgttccctattaaggctagttcttggaggcagtactaaaagtttctcattccactgcatttcctgactcttctactacagaccagccttttagatacatacgggattcagactagatttttggaaggccctctaccccagaagcacagccttagaactcatcagttttaagatgtattcctgagctctgggggacacagaagttgctactattctaggcatttccctgaaatgttcaactttccattgaccaagaaagcagctcgcccaagtgtgtgggaagcacttgggtgggacacttttctgccccatttccagaaggattatcttggtctgaggccttctagtgacagctttagagaagctgactttagtattcggagagaaccaggattgctccaactttctcagcggtattttttcggaaagccattaaattcgtggctcctctgtgcgaagttgatttctatttggctttgaattgttgacggctatttcttccttaatgaaagtgttgtctgggtgaaaaatatatcaggtggctgggaaattggttgatttttttttgagataggtgcccagtgtcctatttttctatctgaggaaagattttctgcagactacagaaattgacagcattgtccgggtaataaccgtcgtcgacaatattttcgaaagggcatttgagtgccgaaagcatttggatattgctttttccaataagaaattttctgccctgagcttctttgattttatagggggtggggagttgactaggggggcgatggggaagaaggagcctcgcattggcaaagagatgccttccccatcctcccagtcctggaataccaaggtgcttgtcagcttcacctggaattcctggatctgaagagccctcaaataattcggctgcgagtcaaaagggaatttcaggaatgaggaataacactcttcttgcgctcctgtaaagcaagtgatggaagctctgaaagtttgcctgctctcaagtgggaagttaggaagtgtgcgttctttctgatttttttaaaaataaaaagtgtctagctttgattcgattcaggaaagctcctcttgggcaaccattgtccgttaggggcttcagatctcattttaagaccttaacagtcctcgccgttctaattaaggaaaggcaggcgagcctgccagccgagagcggttgggtcagcggcttcatggtgcagccgagtctcaaagcgggtctgcactctcgcctccctctgcattctcttagccactatttgcctggtcccgtcgcgtgtgtgcaggaagtttcagtcttgatttatccactagtcaagttcccgaccagctctttttctggatgtcagcactaaccccctcccggagcttggtaaacacagcgcgcgcatttttctgcctcagattggcatgttgacgactctgcttgaaggaatgtgacaataaagtgggaaaccaaagcttggcaagcacttaatcaaggataaaaaggttccgttgtaaggatgtcactcaatttattgtgaaagtcgaatgaattacgtttaatgaaagtgctccccagatgaatattaccagcaatttcctgagttggctctgtcagctcgagatgaggaaatgccaacccagatcagaaaagagcgcccgtctcaattactatgcaagctttccaagagcggctttttattgagataatatattttggcggcttcttcaaacccctccgcgcgcccaagagcgcgtttgcgcattttccaagtttgccctgccctcgcgggttggtggctgttgtttaaacttctgatgagcgcgctgcgtttctgctacgggatgaaaacctaattacctcctctgcaaagagctttccctagtatattttattgattgcggaggtgggagccggcagggggtctgtgggggtgggcggggaggggattctcttgctccggtgccctctgttgccgaaagttccttaggcgtctagtcaggggttcggggtggtggaaagcgagatggcgttgggagccagggcgttgggacggcacaagcagtggggtcccaggagcagcaagacagtagctcctctcgggccacggcttacgaaaagctttcctagctccttcttcctataaattaatgagggtattttactcgttcaagccggaaatacgatggggagggggagacacaggccgcatccagagcgcatcgcctcatctgcatgagaatggagaaccgggaggcttttcttgtactgtttctttctcccacaataagacaaattgctgcttagaaaaactgagtgtttccttagaaactggcttgcgggagctctgcgcgtccccgctgaacctgcctctggccgcgcctcgccatcacccccgccgccctaatggattctgaagcgaaggatcctagctgccgcggctaagggcgcagggggaggccgcgcgtcctcgccacaccggaaggagagggcatccggctcacacatcccaccctatgtcttagaccccgtcctcacacattgactttaaaaggccattttccttcgtcttctacaagaagcaagaaacttttttcgacgtaggcttcataccctcccttcggaaactcagtccgctgaccaaagccgcagtgttcaggccccggggtttcccagccgtagtggccgccgccacagctgcgcgctttattgtctgctttcagtcgcaggtgacctcgagcgatctcgacaggtttatggaaacacagatgcagccctctcgcgtccggagcccaagtccccatgcaaaagcgctgtttctgggtaattttcgtcgacgccaccaagcttcggtgcttttgggacagcgggctggatagcggcagttctcgggagaataggccgcgggctataagatttgatcgcgggcaggcgggcgtggggcacgccagggccgggagagcgactcttcagcaccacggccagcgccacaggctccgccccgcctggtgccagcagtagggcctgcctcccccgctgccgctccggctgggtccttaaagtcgagttagcactctcggtttccgcagatacctcctcaaggcccgctcgcgactgtgacgacccgcctaccccttccagctattcggggggcagctagctcccgtctctaggtccccagcatgacctgcggtcagaaactcttgcttgcacccctctccattaccacactcagtggttgcggcgtcacgtgatcaccacggagattttgcgaatccttcttttccccaacttctccccctacccagtctcccattctttcacagttcattaaatctacccctcccccgaaacagaaacgtgaaggctgtaacgaagagctagaagtgtctctagtaatgtaaaagtctcaactgacagacaaggaaactgaggcaaccaacttattcgcaagagtaaaaccctatggggagaagcgattcctgcccctcttcccccggcgaggaacacggctggagccacccaggcgccttccaggctaaggcgcctttagcggcgcgcaggggtgagggagagggtggggagagtcctaattattatgaatttctaaaggcgcagtaattattcacggggagcaggacaaaccatggctaggcagggaaatcgatatatttgctatcgaaagttcctggctcgcctttaatgcagacgaatgggggatgcagcctcattattttccgtggttaggctcgccagcgtggggcctgatgcagcgtgaaatctatcatcattagacccgggatggagcggcgggggggagtttctctttacttaccaaaccgcaacaacaaacaaacaacgacgaacaaccgccccctacaaacactcattctcacacaacgttgccctacctccctcgccgcttgccctggccgctgttgcacactcccctgggggctgtctgcacgccctagagcagacactgcggtcacttaaagtgcgcccagttcctccaccgcagcggtcacaccgttgatttgatccagaaataagacggatagtaccgagcgttggcgctaggggttgtctatgtcaaaggcgaaggttggctgggaagttctgtccgtttctcttgccttagcataggagtcaatccttttcttgtcacccgattctgcaaattctcgctgtattaaaggagcagagatctggcatgtagtgctccattaacccgtagcataagttagctcggacataaggcaagccctcgagaagggaacgaatcagaaggtgaaaagagcggtcggaaggtgaggaagagaaggtttaggcgcaacgcctcggaggtattctctgaggccctggcgagatttcggcctttagcttaagggccagcccgctagttttctaggactgggtataggccccgcctccacccaccgaggtcactgaactgcccagggtcttgcctgctggattacaagcctattcccatttctcctctcttccgcagtccaccctccctggcacagtctttttcacactcagaagttgcctgatgcccccgatggacagctgctgggatgaaacttgtattcctgtacaggtgtcttcgcagttacctgcaataccatagtacttagggttaactgaggtgtgtgtgtgtggtgtgcatttgtcagtgcctcgtcttcatcgtcttcatctagctcgcccctcccttataacagtgaatcaatcgctgcaaagaagataggatgtagcagttttaaaataacctaactcctccttcattgcagtaaaatgatcgcatttataataacattaatgagaacaaaattaaaaattatggccttccaggcattaaagtaatactatctgtcctcttctcttggattttcttttcctcagagcccagcctttttatggcatattgtgattacctgagtgtctttgtttccttgtggtcagagacagctagccaacacaatactaggactgtatgatgtagggcatgatttcctcccaccctcttcatttttagaggctttgtaattaaactctgtgagatatacgtaacttacatccagtggagagctcttttatttatatttatgtagcatgctgagaaaggaaaattaaggaagtgcttatattgaagtaataagcctgctttgatattaacagaattgtcctcttaatttacttttctcaagtctaaaggactatctctctgagatcagaccccacagtcaagcctctttaaagagaggtcccaataaagcgaaaaagacatttattagcttgtactaacttagaggaacaaaaggccaggcttaccactcactggaaatgtacactatggtaaagtgcagtatgatgcaggaagctgagcagaaagaggtgactggaaacagctgcagggccctacatttttctgcctccctgcctctaacccaccacaatgcataaatttacacatagtgtaacggggccttctagagctaagatgaagatacaaattggcaggaattttaatacaattgaaaaccgcagactaaaagaaagaggcactttcttctctaagaggttattggcacaaaaattacgacaaagatttagagaaaatttcctggttttaaagagcctttttcatttacagattacacatacacatatacacaaagcaaagcaaggttatatgtttctatgtattcacctctttagaggattccatggaaaataattgtggagaattcttttgttttcatataagttgttccaacatgggtttgaaagtaccatttccttggtaggaatctgatacctgacattgcactgttgtcctgtttatgtcagtgttttcagctacagaatgaaagtaattttggtaaagaggaactacaatggcatgatagctgaaattttagtcatgcgcactccaacctcttcaactgaactttagaaaatgattcttctccttgtaaccttgtagctggatgttattagaggcccataggtatataaaacagcttatataaaattaatggactgctttacattcacaatctcttacttgtgaagcccttgtaaaatattgcatctacttaaaataggaagaatataaagttaggtttggtgtgcaatcaatagttgtaaatggttcagtgaaatatttgattgttttgagtgagtttgacaatgtaatggaaatttattgtctgtcttagtgcagtgatatgaacactggtatgctaatcatgggttgtcccttcttttatgtacttgacgtgttttgaaagtgattgtaagagtccaaggtaacatctaagtacataatcaaaattttaggaatgatgcattttcttaacttaccagatacaaagaaatttatgggtcacaaagaagtcatggctaagaaagaaaaaggcctgtctaacattgctttattattttgcttaaaataatcaacaatatatgagttatgtattgttgatattctgtatgcatttttgaataagtaaaggaatagaggttttgattttagcatcaaacataataaaaatgaggctttttgaatgtagttaaatcattaaaaccaaatctcttcctgttttccacaggcacaatttgaggtccttatttttttcttcctccaaacagaaattaaaactacattttctcatttattctgttacatagtgtatagatctctaagaaatgccataaattccactatgatttccttttttcctcactgtatatttatattgggggaatgaagcattttttttttcttaccttcctggactgagaattatacacggttaaaaatcatggtgacattttaaaaagctgttcccctccccatttcattccaatgataactagaatagtaatattcttttttttttttcttataagaatgaccactgcactatcctgttaacatctcctctaaatcagaaacagtgccgtgacttatcaactggctagatgcactgctgatgctgcccaatacttgatggaaaactcttaaaagcataagctgggctatatgagacctgttatattttctgtttgagaaattttaagtgaaaattccgtaattaatcctaagtttaattctaaagcctgtttgcagaatgatgagttgtgatttgttgttggaacagctgtggtgttagtaatagagctgtctatctaatctctgaaattgaagatacaaaacaactttactcacatatttttttccagttatttgtgaatagtttctttcaccagggcaccatcatttactgtgttagagaattaaatgcagagaaagatgcaagccactgcatgtgaaaggaagttattcatgcatggtcagtgtagtatttctctggtcttgatgtggaacttaattgctattgatgtggagattttgcagaacatggcagagtttttgcgtctttcacaagaaatatataattgaatgatgagtgcctggtgttagcttttcaaccttatttcttttggtttaacaatgcagaattgtgaacagctgcagcaaataggcagctacaatatctagctattatcaaataaatgcagatctggcatatgagctgagctaccacttttggatctgcacctcttgaataaacattctgaagtgtggaagcatgaaaagtgaatgatttgccctgaggtgtttaatcctgccttgcattcttgactgaaattcttcacaattagggtgactaacattaatatgtggccagatgcatttgcacagattgatggattcccccccacccttgatgttcctcgaacaagtggttaaaagtgtgagaggctttaaaggcaaagccacgtgcctccaggtggctgatattttcccaaagaccatcatcaaacttccagccaggtggataatatcatggcacccaaccaggtgtcaacactgaattcacttggctccaacgaggacctggccataacagagagcaaacaggcctgttttcagttatcccaggacctctgtctcagatccctcactgcaattcttaagggaagcagcattgtgaaagactggctaggagaaaagagaaggtaatggcaaagtatttccttaattctgtgactttgggcaagcttaacttctcaaatcctcaatttccctacttgaaaaatggggctgacaatacctcccacccattagagttattattgagaattcacagagttaatgtattctaaagagcttagaaaggtgactggtacaatgcaatgatgaactaacaaagaaaaaagtcttgctaacattttagaaagaagggtttccggaccaggttcccatgtgcttccagcacagtccttatgaatatgacacagaagggctgattctatcctagggccatattttttgtttccttctttcagctagttgatagctatatagttgctcagtgctgcccagaaagccatatgtatttagagtggatagttacctttacgattacagccagaagaaaatggacatttggctgggtgcggtgactcacgcctgtaatcctagcactttgggaggccgaggcgggcggattgcttgagctcaggagtttgagaccagcctgggcaacatggtgaaaccctgtctctactaaaatacaaaaaacgagccgggtgtggcggcacatgcctgtagtcccagctttgggaggctgaggcaagagaattgcttgaacctgggagggggaggttgccatgagctgagattgtgccactgcactgcagcctggaagacagagcaagacttcgtctcggggaaaaaaaaaaaaaaaaaaaaaaaggacatttctacagcaactagcgaattgtttatggaaatgaagagacaagtcatcaataggatcaataaatagattgcctaattgagatgagaatccttgtgatgttttaattccatgtggcaaacactatggccatttattaagatgtgattttaaatattaatttgtgagtagtatttgctttaaattacttttaacatttgagattatcttaaaatttgcacacagtataatcaaaacttataatagcctactgggtttcaaagtccaggggcctttggccagggggctttttcctattgaagttcattctagctgaatatctgagtgtgacacattaactccctggaaggacttgtcgaaacagtttggtggaatgagagccacagtatccctctcatatgctgctaaaaatatcttgtataggttaccctatgcccccttccaaggcattgccctgggtatccaagaaaagttcctacacaaaaacactattttgttttatatttgacattagagtggggaaggtgtaaagactactagaaaggataaaacgttccatatttctgtttatattttgaggcaagcactgtgccaggaccttaacatggagttttttccatttagttattttaatgaccctataagatgacatgtactattaatattaggtcatattaatatctttactgttaatatattaatatgctcatgctagtgatatggttgataatacccattttatagatgaggaaattgaggcactgagagtgtgtctggtgtaaggtggcaagattctatctcaggcagtcttattcttgaccagggcttttaatcattaacccatgttatgtttgtgttggagagtctcataaaaatatttcaaaagaaataactgttgccttccatttcaattaagagttctttttttctccctcctttgggcagatcttatttggggaactggggtctgcctaaattgctgttggcactactgtagttaagtagttttattagatgcagtttttattctttagggacttcccatcaaatggggatacaaagttaagaaatgcaagcttgatattgatgattgtgactgcagcttctgctcgtggcatgtgggacacaagcattttaggaagtctgcatctattgacctgaccaatatgaaaaatgatccctgggtctcagggtaaggtaagaagcgagactgggacataaagtacaaccctcagtcatctgtagtagatttaaaaatgatacataacatctgtatctcttctaacaaatcacactcatgttttttgaattatttgccatgtcttggcagcaggaggtggggagagaagagcagagttcacttctaagggggaaaccatatatacaaagcataaactctaactttcctgtggcatttaatctaatgagtcctgccatgctgacagcttactggatttaaaaggggatgcaaatctacactctttttaaattaaaatatttgcacaattatacaaactatgaaacttcaaatctgcttagtttaaaaccttacagtcaaaagagtttcagacatccaactaacttagcacaggtctttcattgcattctgcatgtgtaaagatgaagtagaaaacttccttgacaatattttatagaattattcagtctatgttggatctaggaatttatctatttctgaaaaataaaagtagatccaagacacttttgccccaagtggaaatcctctggtaagagatgagggaggagagtctggcttcatttcagtcttgtactacttttgaccttgggagagcttagttatgccttggggcaaaaaattaaatgttccattttgcagcagtatcatctttcacctttatgtggatttaaaaatgtaaataaaattgctttctgtaaatggtatacatgaaggtcatattcatattctccgcaagaattcaaaatgccatttgacccatcattggctcaatagataataatgtgttctattagtttctagtaatctactttttaagcattttatgacccaatattttaatgcctagttcctagtttgtgaaataagtcagaaataaaccttttagcacttcattgtagatttatttatagaatgtgtgctttcaactttgaactttaaaaaatgccaaatcttcccagaatatatttccttagttataaaattggtctggatgaacatctgcactgtggaagaatatgcatttgaaagattttgagggatctagcttttttttttttttcaactatcatctgtgttccttttgcttattttttcttatagatcccttaggaattagggtttaggaatcctgataacagagtgcagccaacagacttgggaagttaagtgactgttctgtctttcagagagcgggtgtctgaattatttttattgcaatttggataataagaccctgatagatccttgtatttaattgtcatgattttgatcgctaatgacttttgattgcttcttctggagacacctgtcagccgcttccgaagcacagatggctttatcagcagcagtaggagtttctttttcttactaaccttgagctgaacaaattattttgggaatatgaacataccaatgtcatcccaagtttttctgtctttggaacattattttgtttattgaataacgaattgagactgctctttttcaaaagcttttggattttgtttgatagtaaaaagcattagtcttttgtctgagtaggtatgtgacaattattcagtggccaaggccatacaactatggtgagagaatacttctctgtttacttggaacagttctgttttatgcccattgcctatatcaaaaacaaccctcctcttatattcagaagtatcctggtttggatgattaaattatatcatcgtcttacatgtgattcaatgttcaaatggctgactgagaaaggtcgatcatgagctatgaaagattgctgcataggcaagaagagtatttccatttctttttcatgatcctttccccattaggcattcagggtcctcatggacttgggtgcatagggttcaccatggtatgtctcatggaacatagcccaaactcttttccttaaaaatctggtaaaatttttgaatgaaaattgggcagtacacagttagttactggaaaagctgacagaagaaaactgactgattagccactcagatgtcccgcggtttgcatcagcctggtgaaattgatttggtcccaggcccggaaatggaactttgtcagtgattctagagttaatagatattcagaaataaactgactctcaccagaatacgtttttgatatacccttttcttgtgagaagaatatctgaaacattagagtactttcctttctaacaatccaataaccgaatccaagttttctatgctgacaaacccatccagtctttttgatatactctttctttaaatatgttaccaccactgatgaaacttcagttaaatagctgtaccatggacctgttgaatattcctcctgttcccatttttgatttattatatccactgaaggcatttttatctcccttaatgccttggttccttgataggctagaatctcattgacagccttgatttttcatcatgttttacagctctctttgtaaggagatgtaaaggccttgggagtagaactgtgaatgtatgatgctgatttaataggtcagattattcatggtggggaattcaagcaattaattaggatcctaggcaaagccatttaggtatgtggtggaaagaggggaaaagaaagccttttccatgcttctattcaaatgtttgacttgtttttctagtgggcatcctaaagacatatctcagttttcctaaatttcttaggattatagaagttggtgcctgataaagtattaaaaagaatggggggtagggtgaggtggtcctggggattgatactagagccacttcacaaatcttctgtttttgtaaatatattggcaaaaattaactggatccttcttggtaagaagcatcaatgcagattgctacttctgacagcccagaagatgagtgtacttcctagtttgcttttctggggaaagtctcatcagaacatgtaccccaggaatatagtatctgcaggcctctggcaagaacagagttaataatgataacataccagaatttcactccagtttggaaactaaaatggtctaaaagacagaaagaattaagtttactttcaaagatacttttttattttttacagaagtagaaggagagggggaaaggggagagagggagaggaagaaagaaatacttgtatttgtatttatactgtattcagaaactgtcatcataaacgtattaccctctccaatgagctgaacaattgacatgcgatcttgccttcttagtcaccgaacatctgaaaatcattctaaatattttaattggcaggaaagagacaaaaaacccacccaaacatcaaacatgcacaatcaccaaaaatgttatagaaatgcatcattggttgccaaggtggctgtatatgccaaacacggcatttttatttccaactgtggcattttgcagtggggttgttttataaacttagtatatgaacaaatacgctcttactcatgagttgtaaagaaccattttctttaagaaaatttaatatgttttatttattaaactgccttagaggaatattgtgtaggttattgttgatctgaggactaatgatattggtactactgcatctcagaagtgagtaattcctctaacatgctttacacatagtggttttaagatatttgttggttcactaaggataacggcttccagctctacccatgtccctgcaaaggaaatgatcttgttcttttttatggctgcatagtattccatcttatatatgtaccaaattttttttatccagtctatcattgattgggcatttaggttgattccatgtctttgctattgtgtatagtgcttcagtgaacatatgcatgcatgtgcatttataatagagtgatttatattcttttgggcctgtatccagcaatgacattgctgggttaaatggtctttctccttagcaaactaaggaacagaaaaccaaatactacatgtttgcactcataagtgcgagctaaatgatgagaacacatggacatatccaggagaacaacacacactggggccttttggagggtggagtggggaggagagagaggatcaggaaaactaactaatgggtactaggcttaatacctgggtgatgaaataatctataaaacaactccccatgacacctatgtaacaaacctgcacttgtacccctgaaattaaaatgaaagtttaaaaaaggaatttgtcgaatggaattttgtaagagaaagttagtggactgcctttggaacccagtagtttagcagtgaactctgtgatatggttgaaataatgggtaattttcaatgtcttaggtgttcagagtttaaaggggagatagattttaaccactacaaggtctgagacaaagcatttatcctctgctttgtgcatcatgcttctccttctacaggatgtttcagttttaccaagccctttgttcatttgtaaatttgacttgtattgattgggaagtgtcagaattagggccagtcatggagctagatgtagaagattttctgatgacatgcattggccattagccactctttctggcccccaccgtatctttcctcctctatgatatactcaaaattacaaataagtgcaaaaagcctctttaaaaagagaaacgtggctctagaggaacattggtggcttgtcgtagagttagaataagtcaacttttccagcaatcagtgctcaatggaatcccgtgattgaaactagagtccacgtacctattgggcaatatgacactcttagtgaattataaatttctccattcctggggcttactacattagacagtcatctttcctaggagccactgcattatatatatgtgctcatagtaagttgtatttcagagacagaaaatggatgaagagatttcaaaagaagtatgttttctttgataattgcaaaagatattaaaaaatagtctagaagtctaatttatgatgctgtttttttcatttgtgtagccattaacagtagagtaaattgtggaccagagggctacatgtttgtgtcttagattatcagaggtaaccttgcaatcgtatgccacgccattattttttgttagactgccatatgaatcaatgaattattccacccactatattgtcagttctcctatatacataaatctaataaaaggagattaaagctgtgtttgcagaattgtggcatacggctaaaaagaaaataaattggcttaaattaaagagcaacttgtggccactttaaacgactaatcctgagactttaatcagttgtcatgatattccatgtatgaagaaaattgatgtgcagtgtattgtgtcttggtgcataatctctggccctattttcatctgtggtgccattgaaaaaggaaatgagtggatcttttaatggaaatcaggactgttaacagctttagcagaagggtgaaaggtaaagctttatttcctagccaggacatttcagctcacaaggagaacagacttccctctttctgtacaccatctgcacagcctcgtggcctgcattgccattactgtccagagagaatgttaattcccagaaaggatcagaatttgagcaatgttccagcctggaatttcaactgtcataggctgtttgtgaagacaagttgggaggaaattgcctgctgcttatcagcatcctctcttcgttgcttcttccaaaagggtttcagccaatattcaatatcagatgctgttggagccactagcctataaaatattaagtggcttgttaaaaagcacattggcatacttataatttgttcaaaccaaatatgagatggcagggttttcttcccatgtgtcctaggggatattttcttgccaatcatttatttcctgacccttatagagaaggacaattctctggaatggtacacctgatccttgcaaggtcattaggcaattttctagatggagcctctgctctgaaaatgggaagagaggaaagccaggcatgggtaagtcatttgataagtggtgaatatgaggcatagggtagttaattgtcttacctgggttacacgtgttggaatgagaactctagtctgatgatttccattttgcccatgacagaaattaaagccacaggattttactgcttccccatctacataaagttaaagtctaatatgttactaaggagggccttacctaacaacactatgtttttaagggaggtagagttctggtttgtcttggtagtagctgattaccttgttgatcactgaattggaaataataatgaatgcatattataattgttcatcactatttcttgattctaatgttacaataatttcagcaattttacaatataatctgtctatctctgtagaattcacagaggttgtgggaccttgagtctggtccaagtggctctgtgtgctcagcatgtgacaaaaatgatgaatggaattgcaggtttaaggaaacagaggtcttattggaatgacatctgcttctcttccaggccagacatgacatatcaggggtcagtgaatcatggtggaagagaaatttgacaggcttgaaaacgtaactttttttttgtctatttgattttgagctgaaaaaccaaaacaaaagtagttgaatttttctattatccataactttttacatccaaatccataaagctatattcaaataactgcagtaagaaacacatttttgactttatgagccttacagtttaaggcatgttgcccttttatatctattccatgggtaaagtctagcttggtgaaagagacattttgcttttgatttgtgttttaagtttattccttgccagtgatttctaactccatttataccactgtccccactgcagcctagataaggtctctaactctctatccttcttagattgtcaaaatggtggcacaatatcttctaaacattgtccctggcgtctaggacaaagaacccctaatgtccacaaaggtcaattgaatatttatgcttgatacgagggtttttaaaaacattgtgtaggaactgggggttcttcccattttaaaatggcttttaagtggtgttttcaaactctttacctgtggaagaggcattaattcttggcttttccacttaatttctggtggccttgaagaaattctctttactgtgcaaccattttacaacagttggcaactgacacaagggaaataaatgtctacttctctggtctatgtagcctaaatgtctcagacaatcagagagcctcttcctaaatgggggaagaaaacaacccagagatgcaatctgtggctgggtcaggattggtacaccgatggagaaggcattgtcaagctatgcagcaaagaatcagggtgcctgtgacagctaggcctggaggcccacattcttaacatagttggaaaaccgagggtctagtcacatacacttctttttttgccattggtagaatgcttttcattgccctaattcttagtttttttttttttaattttattaaaaaaaaacttgaaaggagcctcagaaggcaggtaagacaacttcattggtccatttggtctcatatagctcctggcattctcccattgttcatacttgtattttctcagcattctccttgactggagtgctcagttcctggctcacctgaaatatttgcatacttatcccttgcttctcagccttctggcaaagactaagtggaggctatgtgtgtatattgatgtgtttaagatcaaggttggcatttctgtcatctttgttgccattgattaaaataattgaaaaaaaagttagagctataaaaaattagcaacaattcagcccaatttcttcatttcaagaaccaaggccaggaatggttcactttcttccttcaagagttagtcacatgccagaggcaggttcccaaagcaattcttaataatgtcatattaaatgtttttattgaattatttgagaaaaattttaattggaactgatgcatttcaaaaattatgaaaataaatgctattccataaaaataaaatgttagtgctagtgcaattgagatttaatctgattgcatatattctacgcttcttcctatgtaatctgtgggactgtactgatgtgaaaagatgaacaacggtgttgcaaagagacgtggagaatcattgactttagggtctctggaattgactagtaggaagaagaccagatgaggaattttctcaggcagttccataacctctttctaagtgggggaaggaaacaacccacagattcatgctgtggttgatatatactggaccataattaacacattgatagagaaaacattctaatacagattcctaatataccctgatacagattctctcagttttgggtaaggcttagaatgtagagctgaaaagtactttggagttaatttacttcatcccctcatccttattccttaagaaaatgaaccaaagagtgatgaagtgactaattcaagatcacatagctagttttaggggcacttaagaagagaatcccagacttcgactttatgtccttcagtatttctcctacaataaaccgctctcagtcattcagtttcttgaagtctcagttttctaatatgtaaagtgatgattgcggcatttggttaactattcaatagagttgttgaaaagaataacctttaattaatgagagagaagacaagatagagggagaaagagagaaaagtagggtttaccataacttcatagagtaggaattatgagtaaaacactgcaaatttagtaggttgaaatgatcttgatagaaggaatcactttacacaactgtttgaaaagatccctcctggcatggaaatagaattttggggtgaggttaagaaggagcaaatgacacattccattccttaaactaaatttataaattgattattgtcttgggagcattcttactcataaaactgtaattacataaagcattccccttaccataaagtagctttttgattctgatctattcatgatttttccttgattttttttttcttccaaggagaaggagttaacttaatgaacatcttgggttgtctctgtggtctaataatttaatgcttatctaagaattttagtattttgcatggaaagtggttaatgaggacataaaattattcatttttacctgaattccagatgaaatgatatgagagaaggatgattaattttatcatgtagagacttcactggattttacaaattaaaggcaaacacccttcacaaaagttcttggagatgtgacaaactgatttatattccattaatttaactctatttaggcagaatcatggacttctgtaataaaacacaaaattaattaaattgcccaatagtataattacagtttcatcagtagagaaaacaactttgagtgccagagtttaaaaatgttaaactgcattttcagtttaatttggttaaaaatgtgtaattgtactctgccctgccatcttctttcttctagaaacattaatgcaaatgcagtcactgctttcccctactaatgacttcagctttgattccagtctactaaacttttccactgtgggtcctcaagactgaaagagactgaggttggggcagcaaaaacattgaaatggaatggaaagggtaaggaaaatctaggggaaaagagtaaggatgtgcagtagatataaaatcccattatgaagtctgcatgtctgtaaagaatatgacagaaagcaatatagacccagatatgcaataaatatttgttgcacgaatgaattcgtgaatgaacattgcagggctgaagatcccttgaaaataaaagcaaacacgagttatatgaaacatgggtgcttagccaaactgagctatgctgtgacaaccccaaaggtttaattgaataagtgactttctgtaggattacatttcaatgtgtgaccttccttgtttccatgttaggtcttctgttagttttgttcagatgagtaaatcaaaagcttatttttatacaaaagaagctcaataaatatttaatttacaaatgtaaggatgatataaatatatcatttttccctaggctagatttttgaagttaaacttttgttaattttatataaaatttgtgcttgcttaagcagcacataaagtaaaaaaattttacctgaaatttattatttactaattttgtacctctgatcttttttattcattctccctaatggccttagacttcccattccaaaagaagatgaaagtaaagagggactgtctttatatctatctttcctcgtccatttagttgttgctgttttggactatatttttgttaagaattaattttttaaaatcaagcagtagagtacaaattcaggggtttgagccttgatagcaaacttgactcctctttgcatggcactctccttaggattttcctgaagcaggtttgtttagttagtaatagaatgtgatcaatgggaaggtttggattcaatgagaaggctatcttttacattttgcattgaccattggacatgcctagctctgatccctctagatgagtagaaagttaggggaaataagccaacagtgttttgaatggttattgcactccaggcttttgtttattgcttaatggaaagtagaaagaaaaaccacatgagccttgcaacggacatgcttgagtgtgaatctcagcactcccaattattgaccacctatctttggaaaaattattcaacaacagtcaaacatctgttggctaactataaaaaggaagattggagtgatcatctcctaagactttgtgaaaaatcaatgaaataatccatgtgaaagtacctggcactcactcagtagggcctcatcacatttcctcaacttcatttcccttacttttggctatttgtgtttggatcttttcaatattaggtattaaaaaactgccttacactgatggataagtattggatggactagaaatgtggtagccattgtctctttggagggttatgaaaatacacaaagattggagaattgcttggagaagatctcagcactgggttgcagaggaagagaacatttggggagtgaaccatgcccccttgcattcagtctctaattgttcagttttcaattctccatcctccctctgtcacattacatggttaggaagagattccagttggcacaaatccctttctcattctccaggttgtattttttttcctttctctcttcttttgcttaaaacaccagttgaagaaagagtaacttcagttactcccaagctctaaggtggagagagaaatagaaaacataaaagaattaaggagacttgaagacagaggaagcctttgtagagactctgaagatggtattattaatgtgaagtagatagcgttatctaggtcactgtattttcctcaaatccaaatagctttgttgttttgctcactttaagaataaacacacggccgggcgcggtggctcacgcctgtaatcccagcactttgggaggccgaggcgggtggatcatgaggtcaggagatcgagaccatcctggctaacaaggtgaaaccccgtctctactaaaaatacaaaaaattagccgggcgcggtggcgggcgcctgtagtcccagctactcgggaggctgagggaggagaatggcgtgaacccgggaggcggagcttgcagtgagctgagatcgcgccactgcagtccgcagtccggcctgggcgacagagcgagactccgtctcaaaaaaaaaaaaaaagaataaacacacaagtgcatacatgcacacctacatatactcaaacaccatttaacacaaatggagtcatactccacaagctacttggggtttatatgtagtatattatttttatattaatatagatgttcttttcttaaaaacattactcttttaaatgaccacactgttatgtatatctatatatctatatctctatctctctgtctattttttgagagagtctcactcttgtcacccaggctggagtgcagtggcgtgatctcggctcacagcaacccctgcctcatgggttcaagtgattctcccacctcagcctcccaagtagctgggactacaggcatgcgccaccatgcccagctaatttttgtatttttagtagagatggggtttcaccatgttggccaggatggcctcgatctcttgacctcatgatccacccaccttagcctcccaaagttctgtcattacaggcgtgaaccactgcacccgaccttgtattataatttataaatattttatgtatttaaagaacatatatgtgctaggcactttacaaatgttaactcatttaatctagataacagctccctggtaataggttctgctattgtcatcactgagaaatggagaaaaaactgaaggatacagaggtcaaatagcttcccacagtcactcagctaatgatgacagaactgagattcaaatgcaggaaagctggctccacagactgctcttaactgctaagctatgctccttccagtctcctattgatgaacatttacattattttcagttttatggtttgtatcagagaaaatgctgatcccacaatgtatagatatctcaaaacaacatgttgtacatgatatatacaatttttatttgccaatgaaaaaataaaacagaatacttgagatgaatacctttgcatatttcatttatccttttactcttatcactgttatttatctgtgtatcattttgcatttacttagttatttcctttggataaattgctaaaagaggaattgctggattgagaggcttattttatagttagactaataaaatctcaaagtttgaagagacattacagactaccatgttgctgcccagcttctctttaatctcttacttgaggtaggtgttacatagattcctttctcttttgtaatctcccttctagcccagaaaattctttactttttaagtaaacattggaatttactgacaaatataattcataagtttaggggtaattcttcagtcatagccaaggcaatggaaaataagccttttataatagatctgaaattctcaaaagtgaaatacatactgctcctttaaaacacaaattgaggcatatttacatatactgacacttccttctttttcacttaccgtcttggaggtattaccaaatggtatctataaatgtatctttttttttttcatggccacatagtattttttttatcatgaactgtaatttacttattgaagtcctcaaatagacatttatattttttaaccctttgaaaatataaacagtgttgcaatgactacatatacactctttcatgtgcagttatattagtattataaattcttggaagtgaacttgctgggtcaaggatatgccaatttaaaattttgatagatatttccaaattgccattcaaaagttttgtcccaagttatgtttccaccaagaatgtatatgagagctgtttttcatatcctttccaactttttgattattagtattttcttagattaaaaaatagctacttatttcaattatttgcatttacttaattttgagtgaggttgagtaccttttacgtgcctaaggccatttatattgctttgttctatggactgttcattccctttttgagttagtcacttaagctttctaagtttagtttccttatctgtaaaatgaaggttttgagggattaaagattatctaaggggttttgtacagtgtctggcagaaaataggcaattaatataaatgttgactattgctggcattatttctcctactccatatttgcatctttgtctgtcatttggacctttcttaggagttcctgattcatatttctattcacatattttgttcaaaaccatatgttcccagagacgtctctcctcttcctcctcctccttttctttgttctctaccttagtggctcttaagtgctcctgcataatcaggtttgacaattctcagtgctctttgtccttcactcctcactcttccttctcccccatatctaatcagctgccaaattgtatcagttccactttaataatctatctccatttaacctccttctttcttagccatccctagacatctttatatccccccgtaaaaccttttaccaacaatgtatgagaggtccttatctgtgaccacttgccacttccatctatcattttcactcttttaggaatatttctttatgaaaacaaagatgctagtatgcatctttttcaaattatttgatagccatctgctgctcataggttaaagtccaaactcctgagtcagacattcaaagcatcttgcaattttaatcttccagtctttttaccccactacactaattctttcatgatcccaaaatgtcttcctgatatttaaccatcctaatcaatcttttgtctgctccctacacatgctcaaggcacctccttaacatatatcacttgcctgtaggagtcaagaagatctagatttgaattctgtttagttctgttaaggcaacctagaaaagataaccaatttcctcgtttattaaaatctaggacaataaaggtggaatgatgcttctacagagtttagtggagtgagaggcacagagcaaatgtgtaatgcgtgtagtgtttttttttgtacttgaatactattattgatagcttatctggaaatgttttactctcctaagaattcatatagcaggtgtatcactcattgggatggcatcctttatagccaaggattcatatgcccatgttctggaaggcctgaaagttagcctaagtagtttagactgtggacttttgatgtttttttgaatgagggagagaaggaccaaaatgtgctttgggaaacaaatctggcagcctaaaataatccagatgggagagaaggagacacgaagacctattaagaggcggatatagataccaggacttgggaaggagaacaattctaactagaaacagtgggacttagaaaggacaacaggaaaatttatagtataggggatctccccaaaatctaaaagaaaagctttcaattgcacaaggaggtctcagtttgatggagaagtatgggtaaaatccagctgaaacccccagaggattattatagcatctttacagaaacatttttctactggaatttctgttatagccccctttcagtgtgatctatataaagaatttagaatagtggaattttctactcgctcctctatgctcaggtgacattggggattgtgtctcctgaaggattaattaccttttataaggcctctcacccctgaaaggcttccttttaggtcatggtccagctcagcctgggttgagttgggaaggattgtatgtgggatgcctgcagtgtccctgacaagtagatagatgagctctcatttctcatattgtgctattaggctcccaagctagtgtagcgcaagataccaggaaagtattgcaaagcagggggcattttcacggtcgctttccagctgttggctgttagcaacaacatccattctgctgctgacactctgctctccctggtggcacttacacttagaaattatttaaaccacttaaagacagtagaatatttaaaagtcaaaatgcctgctttctaattattccctagacctcacttagcaatagctggcttcatgtcacacaacatgactctcatggggattacagtagccccctgaacagaagtgatggtgttggcatgctactaactaaactggagactgttgtgtccacagccttgaaaagcaaagagaatccccttctgtcccccatgtactgcaaagtctctaattcagaggatagggcaatttcaatgggttgttcttaggtggttgggggaatcttgaggctattccttgactcgctttaattcactcaggtcattcctaatgaaatgatctgtgaaaaatgtgaagtagtgtaaaggggatttggtactgttggcttctcttgaccctcactgacttttgtgagtaccttgaaaagtcattaaaaaatacaaaaggattaatgagttaaaggaaatcaagactgggaccatgatattatcaggaagtttgttgaatgagcttttgaatttgctttgttaaatcttgaaaatggcattaagcagctaatggagttgatatattaaatacaacgctagtctgtatacaagatggacactagctaatcagtgatgtgctacatcaattggtatgggaacgatgagctctttttattaggtcagcagaaccagtgatgtatggaagcactaaaatgaaggaacagattaggctgctctttgcaattttaattatgaatttttatgaacagaaaaatgtagacatttttgactgcaagaataaaggtgtctgcaacatttgctggagttctgatctattcatgttcttttttctttagcctcacacctagataaagactcgaagggacattgtaaattaacgtattcttagtttttagtatatcattaaggaagatggtgtggggaaaatcctttcatctgatggcttgtgatattactcatattacctatttttaaaaaagtaaatgatctaaaactttataccttgaagaaactttgggaagtcaagttctagtctttcgttcccttgtcttgaaaatttacttttctttctgtttccgacctgcccctcccaccctgcccagctccattttgtggttgggaggtggtataggatagtggtaatgagcacagggtctagagtcattagagctgatgggaatgtggactctaccacttgctaactatgtgacctgggaccatttccttaatttttccaaaccatagtagtttctgcatctgtaaaatggagataatagcctcccctccttccagggctgttgtgaggatgaataatataaatgcaagaaatatacagcagctagcacactgacactcagtgttcagtgaatttaaaaaattatttggtatatgaatcttggaaagtcttcctattatagagtactttcttttttatatgaaagtccgtcactactttgggtctcttggatttttctgataatgatacttaaagtatgcccaagtttaactaaaatctggtttaaaaggtcaatgtattttatagatctatgaaagggtattaatagctaaagactgtgaaatgaggagccacagaaacatcaggtgatgaagcctcttctggaattctccctaaggtcatatcatgcacatttgcatatagttggcatatgatttacagaagcttcctgtctgttctgagatatttttaacttatgcttttattatggctccccttaggacactaatttcctgagtttccctaatcttctttcagactatcttacatcttacactctttatgttgttaactttctaaaaacatgagcctgagatagtagatatataagttaagtgagggatatatagcggtgggggctagcacatacctttgactgggcttcttaacctgtaaatgaaaatgttgcattttgggtctagcatctttagatcttgtgagaggatcttggaagttcaggggaatcaggttgaaactatgaccagttagttaatacagtggtcagtaacaagatagcaacctctttcaatttagaacattttatttaaagtgagtaatcatgaatacacatttccttagaagaaaggagttatcaggtgttctgcctgttttcttctagaaaatttattatcaagcatggctatttattttgagtcagcttctaagtttttcgggcattgtatactatcagtattattgattgtactctgtaggaatgcctgtaatttgtatgcagttaattaataaagtttattgagcatttagttgtgagataaattgcgcaaaaagaaaaatttgtgatccatccatactccatttaaataaagcaagaaagataaggaaaatggtttgtgccatgttttaatatactttcaccaaaatttctaaaacaaagcaggctatagaataaataatcaatataaatgcttccagaatgtagcatatgagatattctataaagataaatctagaacttggctagagcattaaaaataaagtcagacaaatgtcagacaaatggccaagtaagaatgatctttccttggagttttcctaaaatggttacataggtgagtttagacagttgaaggggatttaaacccagttcagaaatttaaagcctattcacattttatcttgaaaaatgtcttctttgaaaatgctgaccgttagataaaagctatgcttgcaacaatctgcatctgttttactatatctcattttaagatattttgtccatgaatataaaatcttttgctttgctttttggttttgaatttgtgttgtgtaatcaaagataatatcccatgtcctgctatcttatttttcatcaatactcaaccaatgatcaggaaactatggcctgggattcttttctgtaccttaggatgtgtacactccctggaagtctccaagataatactggctttggaaagttcaaagcttggggttaagtttctatgttgcttgcaggtgactgattgaaaatgctttttttatttgtaagtttttccctaatggttaagttgttatgatagttcagttcttagatttgagcgactattctagttgtgctagtgtaaaagacagtgtaaaaaattacccaagataataaaattatggaaaggtagtttcatctaaaataatttattttcttctatttctggaaaagtatataaggcaatttttaagagtgttaaatttttatctgtgattttgagaccatttcttttccatgcaattgatataacaatcttgtttttaactgaatgctcatgttgaaattcttatttttaattcataaatttgaagtttacataaaaagtagatttaagtatctttaagatacagaaaaaagaaatattaaaatgtagaaaaaggatgtcaattttcttagagtcccatattatacaaagaaaggggtgaatgttatttttttaaaaaagtaccattatagtgatttttttgggaaattctacaatctctgaaatttaaattcttggactattttagactttcacatgaatttatctagactttgaaaatgacttctatagtgacccatggactttctgtgataatagtcacatgaacattaaaaaaaaatctttatttgctaacacatttttattgagtatttaccgccaaacactgtgctggatgatttagctccagctcagcagctctcagttttgtgagtataatcaactaggatctaatgacagagagcgtcaaatgtatatgtgctctcagtttcttttctaagtcctgaacaatcgttccctctcctctcatcctttcatgaaactactagtcttttatctctctctttcaaagtatggtcccaggaaacagtcagataatcagataacttacatcttatattgaataagctaacttcattatgaaggttaccagggatctttacactttaattctatcgaattgtggattgaaatgcacactatgatgagggtaaaatacacactattactattattgctaactatagaagtcttccatatgtatgataactaccaaagactagacatgctgggcatttaatatacattgtctctaatccatgcaacaatgtttgtgaaatgtcattatccttactctcagtttacagataaggaaactgagcttcagtgatactggcttgctaaagtccatatggctaattattagaagagctgcaattctttcctaattctgactgcttccaaagcccatgtccctctcattctactaaactgacctccaactgtatcttaacattgcatacattagacaatatggattatatgtcttgtgtatgtagttgacatgcatgcactacaggaatccagctcaggtatggtcaaattggttgaaagtacttttgggctgagtttagcttaagcatctagagttggccatggcccaacatgtcaggcttacaaagaaaagtctatttcccatttacactgtacttttatcgctggatagattatgcagagatctacattgactattaagttggctgaaatgtggatttctatcatttgatgcacatataagtgatgttaatacatgtcaaccaagaatgagagggaagtttttgatatgtggtcaagagtaacagactaacattcttgaagacgcctgaattttttgaaataattttcctacaaagggaaacattttgctttgttcaagttgtggctgttccctagattctcagaaattcatattttgcttgaagctgaatcacttctgaatattagaccatttagggcaaactttagctttgtagggaaaaaatgcagagtaggaacagatctcaggaaaaggtagacctggtgcctggctaagccagtggtgaagtgtcagacctttactggaagttcatgagagggtgagcatgaaataaacacccacctttaagactcttgcttaggcatttcatagcctggtttacatatgtattagtatgatggctgtttatcaaattctttaaaatgtcctgtcaacttgtcaccataaaaacattgttgcaaaggtcctacttttgtagcatgttttcaaggctggcaattgtgaacagtcttcgtcttcaccagctatggctctgcgatgatgaaaattgatttttttttttaagaagaaggaaatagcagaatggcctagacatgggaatgggatcttataaaattctatggttcagagaggatcttacaaatttttctggaggttagggcaagaacaggaaaagtgaacagctaattggaacttcttgggtttcatttttttgggtgattggggtagtgggcagatacaaagtgatagcatttgggttttcagtgagtttatatctgaaaatcagagctagtgcagtaggcctggttttacccaaattgcatttgaatgacttatgtggaactgccgagtttagcgtctcaaaattaaagaaaacaatgggatgtggtcacctttaaatgttactctttaaggcagagatcaggccaatgtggcggtactctacaagaaaagctgtgcttaagggaatttataagtggaatgaaccctcactctgaggggaaggatttgtgaagagtaaaaactctgggtcacacgaatatcattaacatagaagatatattcttataaaactgacctttagtttagaagagggttggaaggacagagggttaaggatgagtattaaaaaatcacagtctcaattctgctacttaagatggggactgctgaatcaatggctgctttggaaatgggttgtaaatacaacagcagacaacctcccttaggaactcattttgttgcttcctacagaaaagatcttgacttggcatggaacagtaggaggaaggattcatccatggccttcaactaactagagaaatcactttttacctttttattcttgaactatctatatttatttttttcttccctggagactagagcaaaatctttgtgaaggtttttctttactcatgaaaacaagtacgctattactcttacatttctcatttttaacatgtttcactgatgttcctttgttcaactatacaggagagcatcttaaattcttttcatttaaaataacaagttacaaaaacagtaggtagagtataatctcatggtaaatggtgtttaccataaagctaacattgatatttttcctgagagagacattacgggtaattttaattcatttattatttttttgatatcctacacgatggccataaaaatttaaaatataaataatattattttatcatatttataatatagtagcaataagccattatttcatatcccaaacacagtagctattattttatttccataggtgatgtgtcttctttttgtgctaaggatatataaaaataacttactgatataggtatattcatattggaactgtacaaatttgtaataattgtgctttgacttgtacaacagctctgcttctgtttgactttgttcaagtcatttaagcccttggggattgtttcctcatctgtataataagagactgcaataaatgatctctaaggcccttctaaaattctgtgatttcatgagtgaacacattcttcaaagtactttgatattcatgatttcatttgattccttgaccacctggtgagggagataacaacattgccattttacaaatgagagactgagccaacgaggggttgggtggtttgtccaaagtcaccctgagttggtatgagaccctgtgtgaggctatggctgtccttctgtgggcccaggctttttgcctctagtgctgtcagagactccaggatctggatgccacacttccttggtggaaggaagggcccaatttcctggtagggaagagagtctggataggataccacaatctgagttccctaatggcagagaggagatggaataaatcccaggccaagtcagggaagctgttggtttcaaattctccttctcagtcttataaagagttaaactaggctgctgaaggaattgactcattagctgcaatagattcccacttgtctaatgaaggcagaagcctcaaacagaaagatctagactaaacaaggggaactcacttggttttagcacctagtcctggcattcctacaggcttctagaagtttggaaaagccattactgttctgagatctcagtttctctatagtccaacaatatggccaatctaccttgtcactgaaacatctccttgtgggccttccataagaggcacatattactaccagtgttatgtgctgctctccaattctaaaaacagaccaagatctgcacccaagaaccacttttctggttatggggtttagacatggcataactgatggtcttttaaaatctttcttaccattttcgtatctgaagttttcagggaacacctttcagattaattcttcaatgtagggaaatggccattgtcaagtgcctaggactatacatgctttattgagcggctgttcccaaccaaggcttgaaaatcattgacaaaagcaggctgtattatctaagttagttgtttcaatgcattacacccaggctatgttatccatcataaatgtacaagaaagcctttttcccactgctattgattttcgcatggtgactatttgtttgtattcttgacaggatgatagtcagctgacattgctaagctctagtgtcctataccccctgccatctaaaactggcatgcgggtgtgaggcttcagattaacacctacttaaataattgctctcttattggaggttttccatgtaacttattattgtactgtattatcagttcaacatcttttcgctcccacacaaacttttgttatattttttcagtttccatctctctatgctgtgttttctgtataaataagcttatattatcatttgctagattctaaaggcattctaaggcagtacacagtgatttgaggtagacatcagaatgctgtgtgtgtttttttttttttaaagagaaggcaaattgccaaaagatagaccagcaatgatagaccttccatttagttaatttcacagcccaatttgactagtctagatgaatctacccccaaagaaccgacggtttcagcttgggcaggatgtcatttctcttttataggctactcagatttcattttccacttgaactgctgcaggtatcctgagctcccttcaaattacccaggagcttgatgaatagctggactcaccagtgagtggacagctcattagccaatctacaagagcctgctgtgactactctgaatcaaaaagccagtttctaatggtggatagccaattaacagcaaaatataacctcgtgaattttaacttaccctgtcaaaagtctgagtttgttctcttcatgatgtttattttccttattgtaattaggaatgtgagaggacatagaatcaagaatgaggtgtataaaaataattttaggattgctacacatattttgtgttttttttctttctcttcagttggtgcaaacaattttgatcagtttctatcaaatgggtgctgagagaaatgatacagaaaaagaagtagtaaagctttcttgtttttattaataactattgttttatatatagtaccaaattgggaaatatagagaagtctaaaaatgaagataatcacccacaatatcatcatgcataatagactcatgctaccatttgattatacatctttctgtcttcttggcctttgtctctactccttactctctcacacacatctaattaacacataccaagtacgtatgtttaaacacatttacaaaaaacaggttgatgctctgcaaactacttcgaaatctgcttttatagttgatcattatattgtgaggatccctatatcatatatctgacaaaactttaatagtcgcatactaactctcaaggtttcactcaatctagccctgatcagtcacctttttcttctagttcacttcatcgaggtctatactttttcatgtctcttttttccaacctcacttttatacccctctctccatctctagtacattatccacttcccactggctttttcttccctctcacctggaatttaagaggaacacatcatgaagctgcggccatgctggttggttcttctaagtaccttctcccagggtgagcagaatgaatgctcctgaggcttatgtgtgaggacagtcccaggtctgagagcagaaatgccattaccaaagtcccagccctggatatcacccctacttgtgggaggccatcctggtttatggagaggcactctgactggggggtgggaagagggtgttgagaacttgttttcctgcagtgtattattctctttgccttttcacctctacattcctagattccttctttagagacccctaaacttcagttgtttaactcttgtgtaaagagatcaagggtgtgaagcctgattcccaatctggcctgtccctcagaggctctatttgaaccctgctgcttggtgtccccagagagaatctcagggactttgtttcctttgaggtttacctttaataggaacctttctgttctataactaaaccataaggttgaactatgtagctctggcctaaaatcaatggataatttgggaaaatttggtattaggtatgtgagggaaaattaggacttgatttacagttgaataataactaaacccatggaatgaagatttctaaataaaaaacaacaatagccatgctgaaaacccaactagagcagaaaagtgatcctctgtgaattgcataaagtggatgtcttcatatgactttcttctctgctaactgcaacaagggaatcgggactgattgctggggaaagtttagtgttcaaaggttttcttctttggtgggaagctcttttttttcccctttcaggatattaatgctagtgttttctaatttttaaaatccttttacctcttcacctcttctattcttgtcttttgctcctgttaaaataagaaggatataatatcacatatataattattgattaggaacactaagccatttgattgaagtaaaatttagtcatattaaaaatgttatcttgaactggcatttgaattctgtaatctttatctctgttttaattccagataatacccatgtctgccacccctgcacaacctctccaacttccactcaccttgccagcaaggaatatttttgtttatttttaaggcaatgggagtggaggtagggtgaatctgaaatgatgctaatattgctcttacatgatgcaagtaatgttctgaaagtaatttgataagttcttctacagtaggtttcttaacattttggggaccataggcccttttctaaatctgaaaatatttatggatcttccattttaaagacttaattacctttccctattctgtgtgtatttaaaagatgcccatgaatctctggcctgttcttggcaacactctgagcggtgcaagtgagtgtggatattcacagtagaatgccctgttctttctctgtcagctgacaagtttcttccctcaaacacttaacctactttttctaatctttttctgttctttcaggcctgggtttgtatcttcatgtccccagcacacacatgccttttgagtctctcctatagaatcctcttaccctatctgagtttagacgcaattcatttttttttttcctttctaacattactcaaaccttagcttgtttttcttttccctcatattcatatgagggattcatatagattcatatttggtgttctttgatatataggtgttatgttgttttttaatgatgcttttacactaaccttcctgatctgacatccttaaatgcaatgctatacattatttattttttctaccttagctatgaagtatatgattaaaaggcttcatgttaataaagataaaaaaaataaaaactgtaatgtgttatacaaaataagctaaaactgtaagaaaatggctcaatacatggattaattaaataaaaatacccagcaatgagagggtgtaactcaggaaagaaccagaaattttaaccaggcacaaccaggtattgttgtacttaaaaatctaacaaccatatagaactattcccagagctgactataggagatcacaatgtacctatttccttatacttgccttcaaatttattttaaattgaagactagctgggaatcttatgccagaagaagacacctaagtacaaatatgttcacgtttttgtgagacttggggtttgtctgtatgttaagcagtacccaaaaatacaccatgtctgtgtagttgggagagtaagcaaatgaagaattccttttctccttcttggttctaaaatggagacaaccatatggggcatgactctataaaaagtacttccctggcggatgacctgggacagcaaatgtccacagtttctataagcaattaaaggaaggtctacccaaagactgatatgcttgtatacattgtgttttacttactcttacttgttcccctccctaccaatcccctgctgttccggagctgtatttttttttaaataattgtgttgctagagtgcaggtgattgatggctatagatcatcactccagtggtcaagctgagttgttaatccagctaataaacatacattttgtggacatgaggatgactgggaaaatggcaataaattttctttctttcctagacttttgcctagcaatacatacaaatgtacaataggatagagagagctatgtaattaaaaaagaaatatgcaaatgtgcctaattttctcacaagtcttaatgcgcctcttaacgtaattctagatttaatggcactttggtgcttgggtcagaccagtgattcttaataggaatcacctcctgctgcagggatggtgctgggggaggatggctgcatcaggatcacatagatgagtgtttaatgtgctgccttaaggaaacatgctttctgagctgaaaaatcatcactgtctagttagccattattgctattctatttcttatgtgtcttattgtagagaaagattgagaaccacgtaagctgattgtccagggactttattacaattacgtgtttgaatttctgactcccttatcagcttttaaatctgggatttaaaaggcctgaatcatgtctgcctcattaatcattcttgctaatcattaataatcttgttaataatttgattcccattgctacacttatagtaggtgctctttggatatttgctgaatgaataaaaagatgaatgcatgatgacaaggagacattgcagttggagatttctctgagattggattgtctagttggaaattaccttgcatgagaacttgcaaaaatgtgtaactgtctcctttcctccaaaagccaccagaaaaacatggtgtaggtttcttaacatttgataagttcttctacagtaggtttcttaacattttggggaccaaaaactgtaatgtgatatataaaaataagctaaaactttaagaaaatggctcaatatatggattaattaaataaaaataaaaatacccagcaatgagggggtgtaactccagaaacaatcagaaatttaaaaaatatcagttaagaaagaataaacataaaaccaaataaacagaatggataattccttaaaagaaatataaagtaaaatggacaaattttaagatcaaaaagaaatgaagaagtaaagtttttgtaaagaaagatccaacataagtataatggaaatttctgaagaaataaaccaagagaacagaacaaattctaaaaccataattcaagaaaactttccagaaataaaaaactgatttgaaactacatagtgaaatatgtagctgagaaagtccatccagaacaacaaatgccaagacatgttctagcaaaatttgatacaaaaggaaacaaaggccatttgagcatattgatcaaaccaaaagtgatttgtaagtgaaagaaaattagattattatcagacttttttgatagcaattctttataacagaacaaaatggagtaacatacttaagaaattcaaagaaagaaaatatgagccaaagatttttatatctagaaaaactgacttacaagtataaagggctcagactattattggcatacaatgacccaaataatgttgttcccttgagaactttctgagagatctactaaagaatgaacttcagacaataaaaaataactatggagatattgtcataagaactggtgataagttaaaaatactgtttgttaactggttaacatatattgtttaactggttaataactggttaaacatatagttacttgtagaactaagattaaatgagggttaaagatcaagtatctataaaacagcagatttaataaaatgaatataaggaataatttattaaagtggggatacaaatgaggtaagcatgttaaaatgtttaaaagctattctcattaacttcattggtggtggtagtattgtattgttattcttagacagttatgtaactaatatgggaaaagatgagtaattatgtgattttctaattctgtcattcctgtgtatctttgagcattagaatttttgttgcagaagaaaggagatacagatgtaattcggaaagggctgtattcttgaatttaaattggaagtaagagtatgaactcaagacgtctttcatatgtataaatgtatatctttgtatatctgtctctgcccccttaaaggcttaggaaaagtgagcaacttagtgcaaaaagcactcctagcatccagatcgtggtggctttgaaataatatttctcattaaaagaaacaggacttagagaaatgactaattccaggtctggggcaggaaatgtataagatgaatctggaacattttgttaaatcatatagctaggaagctatcagaaactcctgtggttatgtcaaaagaaactcaggaatcaattttaagaacctccaattgggacaatttaagcttcaaaagagataataattgcagtggaataaatccataaaataagttaaatgtgtgagtagataacggtattttaaaaacctagttaccttcagaagacgcaagagaactagttcgttgtcttgaaaatgggtaaatagagggaaagaatgtaacattgatcctgcctttccaataagataaaaaataattaataaataaaattagagatgtctagaaatgtatacaagtgataaaactataaaaagtgattgctataaaagttgggatagtggttacttttgggaggagggagatgtttgagatttggatggggtacactgatgagatttcttaggtagctgacataggtctatattttgatataggtggtggttgcaggaagttggccttataataactcattaaactatacatatattttctgtgtggttttctgtatttgttttatttataattaaaaatttgaaaacaaaagagaaaaaaaggttggatggaatttttattttctctcctggatgaattctgtgactcttcctctgctcatatatgtggcctgagatcttattaaatgcctacagttcaaaactcttgaaatggaaggcaaatctatctttacctgggtatgcccaatgctccagagaatagccatgattcagaatggacaattctctcttggaatccagaattattctgcactttatttgcctccagggaaaacaaggtgacataggctcgttgtcaccagtgagaatttctaacacttggtgtcaggaaactgggcaataaatctcagtggactaaaccactgccctaagtggcttagtcatgccttaacactccctgaatagcctctaaaaatgactgcaacagctgtactttccagaacctagagttgatctttatttaatttatccatctatcgtgtgaactttgccacccggcaattgtaagaagaaaaatgagtcaccaagatttgtacattgtggaaggcaaacttccccctccccaccaagcaatcctggaaattaaatcttttattccttagtgattcactaagtgtttgcaatcatggtccacacatttagttgttgtcaagatggatatttctaaaggtattattttttcatttcatggtgagactctttttatcttccagacacttcaattactgacagaaactaggcgtgagaggctcaaacagtgaggtttcatttgtacatcggtgctcaggatgaggatcacacatgtactatattgtgttcaatgtctgatgaaccacagcagcctcttttgtggatgttggttgagagttctgaagctcaattaaaggtctcccttttcagtcaatatcttaaaatataaaggagatacctagtgatgattatactggtcaactcctttttctcctttgcggaactcatatagaagaagctgcatcatgaataatgctggagtgacttgagaggtcagaaggcaaattattcacatgaggccatagtgcatatttcagagatacctacgcagagatgtcatttatctggttgcagtggtaataggatgggtatagaaaaatcttgggaaagaaaaacacctccatgaaaatatttgttagtggttgtgaaagatcttttgatttgagggtttgagggtattgggaaataaaataaatactatgaaataaaacacagaggtcagaagtgaaatagtgagcctgttttcattgatcttggatttgttcataatttagagacatctaccagattgaagttagcattccaagtaagtgatgtaatttataaaactgaaaaaaccctaaatacccaccaaaataaaaatgctttatcttgctttaataactttaatttcatcttattttttcatttttatttcattttagattcagtgggtgcatatgcaggtttgttacctgggtatattgcataatgctgaggtttggggtatgaatgatcccatttcccaggtaatgagcatagcacctgttagtttttcaatccttgccccactccctccttcctcccctgtagtccccagtgtctattgttaccatccaaatgacttctgagccctctggagttcttgcatagatcacactcagtgctggcagaacaggctgactagcacctgatgccccctctggactgcttcacttcaccttggacctgacgcacatgcagccttgttgcctttttatggagcttcctctaagactgacttgggaggctcagagcatctggtcaatgtaggcaagtccgtaggctgggattacgcagaagctgtggcccaacagagtgaaactgctgaacttcagctttctcaccagtttgcttcactttaaagagcagcctcagcttgaacagctggggctaaattgcagggaaagtgtttccgtgagctttgctggctttcccaaatgagtgtgtggaatctggcccctgtcagcagtgccaaaacacagccttctgattgtgcctcagtgaatgaaatgagggtggcttcatttccctttctaacatccatttcccacacagtcaagtctcctctagccaggcccacttctgtttttagcaggaagctcttgaggccagggaaatctggaagtacttattgtttatatggcactgggagtctttaggttctcttttgggcttccaagcttaaactgacagatttgtggctcaaagtgaaagctagcctgccctagctcaggattcaagtctcagcatttcaacctttttctctctctggactgttctctattttggccttttaaatcaggggtggagaagacttgacaggtatgcctccatttctccctcctgtacaaaaggccaataatgctcatggtcattgacttctttctgctaaatccatattcaacctcagaatacttaatactatggtcaatcaatcagttagcccacatgttgaatcctgtttgctgtttggtaggagtgacagtggagaatagtggcccaagagactgataagcgggccttatcccagcattgtgatggatggtgtcttggatagaatggttagaagaattgtcactctagctctatcacttaccagttaactacagctacatttgatttcttgaagcttagtttttgttatccaaataaacgaaatatcttctctaaatacattacattttgttgtcaatatacggaaataaacaaatgggtgtggattcctttgcaagcagcctagtgtgacatgcatagaagctgttagcaatgtaatattaatacattgcaaattcctgcttctctatttcctagacttacagtaacagttatatactaggtgttttaagaaccaaaaattccctattaatagtgctgtgggaatgtacattagattgggaatcagatttttgtttctgtgctacaagtaattgcttataatatcttggttgtttgggctctacatccatatttataaaattatgaggttgaattagaagttttaagcattgctcttagcactcaaaactaaaattttattttattttcttttttttaaaagacagggtattgttcagtcactccggctggagtagagtggtgtgatcttggctcactgcagccttgacctcccaggctcaagcggtctacccacctcagcctccagagtagctgggcatggctaaattttgtattttctgtagagactgggtttccctatgttgcccaggctggtctcaaactcctgggctcaagcgatctacccagctcagcctcccaaacggctgggattacaggcgtgcaccaccacacctggctcaaaaccacatttctagtgaaatcatatgaaaccctgatatgagacatataaaagagctgtgctaaatcatgtcagagtggggtgtccagaggcctgcctgtttgacctcttctgaaagtgtcccagaagtactcttgtagcatcttgggatcccctgaaaatttgaaaaccactagaccagatgttctccaaggtccatagaagttttaacattctacaatgctaaatgtttaaggaagattattttctcattgcctttattaactttccttttatatggtggaaataactggaaatttatggccattcctatgcaagcacagctagcaactagaataaataacactccccccacctttttttttttttttttaagaagtagaccatagaggatgtcagaaatgttttttatagtcttgtctgggaagccatttgcttcagtaagccttgaatcttcatatgctctgcatgcaacaaaccaacaaacaaatttctacagaaatctatttagtgtcttccatgtgccaatcacaatgttcatactggggctacaacggtcactaagacactgccctacctcaaaaatctcacatagtcatagttgttttcaaactgtgctcagcaaatcacaacagaaacctcatattttgggccttacatatcaagaatttgttaggtttctaagggctggcaccataacatagcttgcttttttgtgctggaaatacttggtccgctttattcaccgtagctggtctaggtctacaccatcaagcaggatgatggcaatgcctgtgactgagagctcagtgatagcagctgtcaaaggatatgtaattttgacaaagcacttagactttcttttcaacaaaaataagacaagttattttaataacacattttaaataatcctaggatttacattaatgaatgaaataagattagccctgtaagttttaaactgtatgcaacataaccacttcataagttgcttaagggttatttatttactgaacttgtttgagtaaatgtcataaaatcgagcttttaaaaaatgatgaaaactcaaggtatcacttttgagaagtagtaataggaaaatggacgtatgtaggtgtatttaatttcctcctttctttctataaaaatagtggtatcctttctttaatcagggaaaaatattgcattattcagtaatggatcaaattccagcaatgacattttacctctgttattctatactctatttagatacagaagccatcacttaagcaatttgcaaaatatgtaagcttctaaaaaaatatacaagtgaggtaattgtgagtctggagcatatttgttagggcactgatatggtttggctctgtgtccccacccaaatcttaccttgaattataataatcagcccatgtgttgaattcccatcagccacagggaacaaaatggcattatgcctcttctaacgtaagaagaactagaggagacatgtcatgggagggacccggtgcaaggcaattcaatcacgtgggcaggcttttcctgtgctctctttgtgatagtgaatgagtctcatgaaatttgatggttttataaaagggcagttcccctgcacgtgctctcttgcctgcctccatgtaagatgtgactttgctcctcattcaccttctgccatgattgtgagccctccccagacatgtggaactgtgagtccattaaacctttttcttttataaattacccagtcttgggtatgtctttattagcagcacgagaacagactaatacaccaagccgaaaactgaagccaaactaaataaaaacatgtcaacacatcctccagagggtcttgttcgtggatatctcagaagttcctcagaggaacttctaatttctcattatctttcctcactccacagaaggatggcacaaacaatgactctgttcttctccgggccccatgagctcccattgtcttccaggagataggtaggggtggaggtgggatagactagaggtatagtattttgcttaagtggaggcggggagggggctcaaaagacttctcatttgccaaagttctttgcagtctaaatattatattaaaaaacaactatttttcaactgtaggctaataagtttcaagggagacatcagaggcaataattacaaattattttcctgaagagaacattttggattcaggtattgattaggaccctctgtgaaaatgaaaagaaaaccaagatgaataaacttaaatcaatgtcataaaaattagaacagcagctgccagaaccatttgtgggttaaacttcattggtgttcatctggcattgactttagttataaagatcagtttcaacttacctggtgttccctttccagcctgacttatgaagataaaatgcctagaaagagttactcttgggattttaaaacatatgatgggatttgaggtaccccataaatgccatttctttccccatctgaataagtcaaaaatattttatttctgataaaattgattttggagattgtaatttttatctgcttgcaagtagtttccctccttctgaaggaagaactagacagaattcccttcagccacagggagcaaaatggcattgtgcctctcctgatgtaggaagacctagaggagtagagcagaatatattctttaaggaagtagaatgttctttaaggataaagctaggaagcaaggccttggttctgactgcctgttttaccttccaaactcagtctgattaattttctcctctgcagcagataaaggctggcctattgttttagtaagctcctttacttgtaagaatcatttggaaaggaaggagtattccctcaaaggatacattcttcttttaataagactgccttctgccacagacctgctgtgtgaactcagacaagtcatttaacttttctcaatcattgtttcctcatctgtaagacaaggatcataaagacctgcctagtagattaattaagcgagataataaatgccatgctggatccagccctgcctgcctctccaaactcatcctgtgctagtctacacttatttctaatgttctggctttcccatctttctttccattcctggcatacataatgttctttctgacctcataatttttggtgtgcagttctctctatctggataggtctcttctcattatttttgatctggttaattcctaccttttaatcagttctcagattaaatataacttccttagttaaaccattctaatctccctcatttatttaaattacaggccctttattatttcttgcatatagcccttgtaagtaataatttatctttctttgattattagtttaatctctattttccatgatcagatattatgcatataagaacaagaacctatgtttttttcatttatcattgcacattgagagcctttagagtacttaacataatagtttctcagtacatatttttgaatgaatatgtaatctacttatcatatattctataaatagtagtttccttttgtttctcctcaatatgttatcagttcactggtttgtatgatggtagatccatcattagtgatatggtttggctgtgcctccacccaaatctcaccttgaattgtagctcccctggtgggaggtaactaaatcacaggggtgggttttcccatgttgttcttatgatagtgaataagtctcacgaaatctgatggttttataagggagagttcccctgcacatgctctcttgtctgctgccatgtaagatgtgactttgctcctcatttgccttcttccttgattgtgaggcctctccagtgatgtggaactgtgaatcaattaaacccctttcctttataaattacctattcatgggtatgtctttattgcagcagtgggaacagactaatactgtaaattaatctagcttctctcttgtccttccattttatcactctacttccatactacttatgcattggtactgtatctctctaatcactgtaacacttttaagtgtcttgaaatataaatctttttacttcattcactagcttgctctgaaacaagtgactctactcaaaatagaaagaataaaattttggaatttgtttaacaagggaagcttccccatttggagtgagaccgtgggacatgagacagcttcggactgtgggaagggctcacagtttaatattagaggaggtgttttgaatttctctttcaacaccagattgccttattaagtaatttaaacttccgaaacttaatttccttatctgaagaattttaagggtcacatagaataacgtattaaagagttaaattataaaaggccattacaaggcttacaaaggtcatcagttgtaacttggcaggattaggtacttatcaggctctgccaccagattataagccagtttagggcaaagtctttactcattattttgtcttccatagttcttgctcttcatttgtttaatggtgataacaatatctaacttatagatctcatgaacacattttatggaaagcattatcctacagtaggtaacttttctttttcttcttttaccactatcccataccatgggacacatactatatcttacatattacatcttacatactacatcttacatactacatcttacatacacatttatgtatgaccataatgtgatctgtcagtttataaatcatacatccattagttgtgatatcaggcttcaaaaaaagtaatgacttccctcttaaatgtttataacatttgaccatttaataactctagagattaaattgattaagtgattttcccagaagcataaagctaatcttatagaaatcaaaatgactgaaacccaggcctcatctcccttggttttgtaattctttctccaaccatggccgcttatagtgctaccagaaggtacataatgggaattttattttgtgccttttattctaatttgtatgtttttggtcttctgaaggctaatcgaggacttgcctctttcatgttcgccttcatataggaatttctgacctagatcaatcacctatagctgtggaaccaagaataaatctacattgagtttctacatctgtaaaatgggcacaatggtaggactcatgtcaaagcttctgagggttaaatgagataatctctgtatcagactgtgtacagtttctggaagatagtaagagctcaataaaaacagctaatgccattgcttctgttaagatgatgggttttgtaactgtcaacttcatcttttagcagcctactgaacttcaacaactctgttttgaattctgcagtaagttctcttaatgtcccaatactaattgtggttgaagagtctttggactcaaacctttcagaggcagataattttgttccttgcatttgcaaatcatcacgtatggggctctgatagatgggatgtgattacaagattcgtgtccaagagaatttcatgtgattggctgtttcgttgtcagggctgtgacgggagggtaaaataacagcaacgtctgtccccacgtgctggggaagattcggcctatctagggatgttctcttccttcttcagtgttctatacagaactctctggaaagggggtggccttctcatatcgaaaaggacccttcttcattctagggagtctgaattttcatagcaccattgagttatctgttccagttccagaaaattctggtggtataatacaggggatcaagctactaaccacaatgaacaaagagaaaggaactaaaatttactaagtgtgtatgatgtgccaggtacttcacttgggtagtttagagctattctcacatttagtgtcaccaactccactgaagtctgactggggctaatggttgagtgggtggtgctcttactattaaacggttgattcattcatgagaccctgggctgtgcagactgaacattttcttagccaacattggcccatctgaaaataatgggcaaatattaggatactgtgatttagaaagaaaagctcaagattcctgctttgctattccatttgacaaaactactcagactcatggcatattagtattatgaatgacatgttgaaaggacctgccttaacatacccttaattcccttagctggacatttaacctccaccaacaaattcaaacctgctctcagttaagggaccaatttaatggatgtatcaggagaatttctctgcatctcaatagctttgctgggtcatgttttggtctgatgccctggttcaaggtaaattggttcttgatttaattaagccaaacaaatcttactctattgagcctatgtcttggtccctccaacactcaagttctgcggtatcttcagtggaaaagccagaggctattgtattcctgagtcccagccttaaaaggagtgtccttcagtatcctactgacttagtctggctctttgaaatatcctctcaaggcatgtgcttgatttgtgcattcaaagtccacagttttccaaaccaaatatttaaatgcttttctgctaataaaaaataatttcatgaatgctacttagagggaaattaaccaaatcattctggcagtaattcagattaattttaaaaaacacaggagagattaaaagaatgcatgaatggtaatctaatgagtacagaaattactagactaacttaaatccatgtattccaatgttacagtaggaggtctggggagttgcagagaaatagctgcttgtagttacacatacacaggctgttttttttttttttaagcaaattgtaaatttaattagctgattacaactttgtaaccaaattgtttacttggtacttcatagaaaggagtatagttttcattctcatttaaccttctctgagtgaaggaatgtggaagtgatgattcattttttgtggtcctacatttataactggggagcgctttgcttcctgtgaagcagatcggttccaatgtttgtgggaacattttgactacaactgtttactagtataaaaatctgtgttataaaatgtgagaatcactgttttctatgtaagatgtcaatagttttaaaatggcaataaatatttaagggggaaggagacaaaatatttaagtgattctaaagcttgatatcccaagcgatataatttaatcacaacagccccaccttccaggtctttaatgttttaccaaatacattttatgaataaatattagccaagtacttctggtgtttgtgattaaatattaacagggttatttttacaaaatgcataagaacatttcacaggactgtgtctatgaatgtaaataggttgacagacattttgacagatgcttatgatttcttgtagtgacacctgcgacacctgctttggttattatttactattagaaaaacatttttttttgcctaatgttcaccagttgccttcttcctcatcagtgtagcttgtagtttattatcctctgaaaatgtaattttaccagagcaatgaataaaaaattttgtaatttatactaataagcttgaacgggaatccacttgctttggacatttccagccaggcataatttatccctatccttggctgtgaaacagtgcggattttcttaactgagtccctgacagatggtttcagtgttttcaggactccatttccaatcattttgcccatattgcaaaattggccttgaaaaagggtaaagagttgttatgctgcattaacatcccttcagaattgcttgctgtgaagggcatgaagaaatgaaggaaatcaagacagtaaggtttgaaaaatatgctcccggaagttagaaatgttagtgacatattgataatcccagattacatcacgatctccatttgattttgattgtaaatctcaaagacacattaaatacactagtaaaaacacaaatattcagttagtgtggctcataagccattctgatggtattcataatgtggaaagctagaaagggctatcgtttaggctggcttcccatcatcttaaatcctgctgataggtaccaccacggactgttagatgaacagggattctcacagtacttttcaagtcttgctaccagctcatgatgaaagcactgaaatatctacattcattttccaagaaacatgaattgatcacattcagcatgccaaattttcattttcttttgcagcttcagctgactgacttcttcatctaaagtgctgttcttttcttttcgtcgccttttagtttatgatcaaaatcaatgaggactgaagctttccacagccatctataaaatgcaattactgtatacaacacacagtaaaactcctgtggtgtgtatgttgagacataatttatgccacttacctccagaggtatcgatctttttctgtgaatgttttacaaaagggtctcttgagtgcaagcacaaggaaatatgtggccattggagctgatctataatttgattaataatgaccaatcttttgaacttgactccttactgcacttttattgtgatccgacattagaattttagattttttccttttgtcattctttccagaagcatagttattcctacgttttgacgtgctaatcttgttacttgccttatccatgatgtcactcttattaagtttggcagcactacagggtgatgaatactaaatttggagtcagaagatctgagtttgcttttgatttagccatgtaagagctgtgtgattgtaggtgcactgcttacatacctgagtctcagttttaaactctgcaaaatagaaacaataatccatttcaggggatgctgttttctgaggagtaaataagatatttatttattcaacaaatgtttatcaactaggccttttgacaggttttgggggacacaatggtgaataaaacacacatgattgctgacttcatggagcttacacaatcaactggtatgtaaataaacttcatatgctttaatatgttatacacatggaagatggcgccatcatcatcactgctatgacacattgtggttgttgtcatgcctgagagtggaaagcacaataatgctgatgctgtttctgacagtgggtcccattggtggagggagcacttagaactaatgccatggaaattgttctgaaactgcacaatgagccttcttaatgctccaaagcttagcatttactagtttatccccttaagtttggctggaaactctatttattgattatttcccttgtagccagagtgttctaagtgaaagagacagaaagaaaaagaaggaaaggccttttcttttgactctcctaaaatgtaatctattagagtcaatgagcacaggaagttcattttcaaagaacaaaccttcctgattcatccacggtccctcaggatcttatcttggggcagcatgtgatgaataatccactctcctctcgactatctttgtgaggcagggtaaatttgtgattaaggggttgtggccctttgacctagaatatatttgccattgccagggttatattatgggattttctgccccccaaataatgtgaggacaatggttagttcacctgaaggaatgtctcctgctaaggctctgtaccagccatggaaggaagtatgttttaaattacttgcaattttaaccctatagctctggctatttcatcacggctggaggaaatgtagggttcaaactcagtacttcgctggcatagaaaatggcagcaggtaagtaattggtatatcagactgccttatgctttgactttgcttactgctgtgcccagaatctcatactttgctggaacatttggactatgtgaagaaagaacattttgtcctgctagaatgagagaacagctcaggctaatttaccttgagcagaaaactggagagtagtattaaacttcattgttatatgactacaatatattttctctccttgacctggagtaaatgtccacttacgggattagaagaaaattaattgcctacttttagctcactgaagtcagggacataataaaatgttcatgtatctgtgatcagaaagattgtattgtcaagaaaatgttccagtggcacatggccactttttgtcttaagcacaaaagtctggaagaaaccacttctagtcagatgcgatacttgtgagtacatgaaaagttagctctttctctctcggtctcattttctgtaagttttaagtgccaggaaaaacatgggtactattgggctaagatccatgggatgggatattttatcatgtttttgttcactcaaataagaaaagggatccaaaaaataaaatgagggtaagcttaagaagaagttagttgatttttataatcatgttttaaattagaaaagttctttcttatgtatagtatcctagattttttccgtctcaggatattgaaggcctttactgggaatcaagctgtcagcaggctcacagggaggtactacttgtcacactctgttttctaacttgatttttcaaattagatttcttgatttttcatagtagagtgatttttcataggagaatgattttttttggcagaaaggcataatttcttatgtaaatttttattcctgcagaggaaaaggaattaattttcattgactatacagaatgtgataaatcccatgattagcatgttacacatatttttcaatttttatctctttgtatccacctgtgagataggtagtatctttttcttttttactgctgcgggaattaggagttaacttagtttttctgcaaccttatttgacatcagtaaggctcagtttctcatttgtgaagtgacgctgatcatgccttcttcatagatatttaatgatataatgtgtgtagagtgaagatcacaatcacatagtaacagtttcagaaaattgttgctttttaaaattttcattattattactatcatatttttccctacctccaaataccttgacaatgccaataatggagtcaatcatctgaatggtgtatctttgtgcagtacaaccaattggttctatcgagttgacagaattatcctgaacttaagtcactgcattaattgttcttattccaggtacacataatttcatggatgaatctgcatatgcatatagaatacaactcaactggtttagtggtctagcttttatgggcacagagtaatagattgtggtggtgagaacatgatcctaagagtcagagacctgagttctaatcccagaggtacatcctgattgtactcccactaaatgctgtctcttggttaagttcatgcttttatttcctcatctgtaaaatggggataatatagatttttgtgaggtttaaaaagggatgttaaaatggaagtttcagcaagatatcatggattagttaggtttctccagagtaatagaatcaataggagataggtaataggtagataagtagatagatagggatttattttaggaactggctcagtgattgggggcactggcaagtctggagtttgtagggcaggttggtagcctgcctactaggattgatgttgcagtcttgaatctcaaggtagtctggtggtagaatcctttttcctcagaaaacctcatactttgctcttaaggccttcaactgatttgatgagacccacccacattatggagagtaatcagctttaatctaagtctactgatttaaagattaatcacatctaaaaaatattttcacagcaacattgaggcttgtgtttgaccaaacaaccgaacaccatgttaggtaagttgacacataaaatttgccatcacacaccatgatgccatggatgagaaattctgaagctggttttctgtagattgacttcatagagaatatgacttagagccaattccatacttttctagcattttttttcatattctaaaaatgtaagagggtctatggagaaggaagaggaatgatttaggaggagatgtaactgaagagaggcatattattttgtggatatgcagaggaagaaagaagtgggatgggtgttacctcctctgcctcaagctttgtgaatgagatttctataggaccactcagagaatctgaaatatgttccttgcatgtgggagaaagacttagaggactggggcttacacaggcatgggagtggggaatgggcctatggcagcaggatagacatggctgccacggtatttgtttgcattcttggaatttagtggggcaggcaaagcatgtattgtgtttctggtgaatcacaggagagagaactattgtgggcttgtcatgggtctttctaatagggcctcctgaaggcacagagggttcctgtggaaagaacttaagtatgagcactggatttataggggcttaagagggactaggtggtagctagtttgaatgaagttatatcaaatgagtggcagcattaggattctccaaacagcacactaaaagcccactggagagtcagcttcaaaatctgccagacctggagagtgcaaagattattacaatagtaccatttcatgtcgggcctttctttaccccttacctctcttcacacacacaagaccccttcaccaatctcagaggagctggtgtgtgaagggtgagcacaaggtagacaaatccagaagccaggcatgttcctctttccttcctcattgttttccatccagctggaggagaaagaaggcagaaattttaacattaaataaaattcagacttttgatgaatatcataatcttgacactctaatttctaaactgagattgtgttcataatttacagcaatagtaattgcaatttaatataatccaagagtgggcagaagagccttgagacctgcccaagtctttaattggagtcaataagagacaaaagagaattgtgtcatgagtacttgaaaatggttttcaaagggtggtccccagacaggctacagtagcatcgcctgggaacatgttagaaatgcaacttcttgggccccatcccagaactcagggagagggagctcagcaattgcaagcccttcaggtgactgtgaggcatgctttactttgagataacttgtcctaaaacaatgtctcaatgtctcacaagagaaaagtagtttccttttcttatgctcagatatatctatttaatgacccatgcttctcataataaatataaaggaggtaggtaggtaaataaaaacagattttttaaaaattatactttaagttctagggtacatgttcacaatgtgcaggtttgttacatatgtatacatgtgccatgttggtgtgctgcacccattaactggtcatttacattaggtatatctcctaatgctatccctccccttaccccatgacaggccctggtgtgtgatgttccccaccctgtgtccgagtgttctcattgttcagttcccacctatgagtgagaacgtgcagtgtttggttttctgtccttgcgatagttttctcagaatgatggtttccagcttcatccatgtccctacaaagaacatgaactcatcctttattacggctgcatagtattccatggtgtatatgtgccacattttcttaatccactctatcattgatggacatttgggttggttccaagtctttgttattgtgaatagtgcagcaataaacatacgtgtacatgtgtctttatagcagcatgatttataatcctttgggtatatacccagtaatgggatggctgggtcaaatggtatttctagttcaagatccttgaggaattgccacactgtcttccacaatggttgaactagtttacagtcccaccaacagtgtaaaagtcttcctatttctccacatcctttccagcacctgttgtttcctgactttttaatgatcgccattctaactggtgtgagatggtatctcattgtggttttgatttgcatttctctgatggccagtgatgatgagcattttttcatgtgtcttttggctgcataaatgtcttcttttgagaagtatctgctcatatccttcccctactttttgatggggttgtttgatttttttcttgtaaatttgtttaagttctttgtagattctggatattagccctttgtcagatgggtagattgtaaaaattttctcccattctgtaggttgcctgttcactgtgctggtagtttcttttgctgtgcagaagctctttagtttaattagatcccatttgtcaattttggattttgttgccattgctttggtgttttagtcatgaagtccttgcccatacctatgtcctgaatggtattgcctaggttttcttctagggaataacaacagattttaacctgtttccttatagcagtagtattaaaactgaagtttcctcctctgtatgagacaatcatagggctctgcttattttgtgagaatattgaatcaaatgagctaatatctgtgaaaatgctttttaaaccatgaagcattgtacacacgcaagttattattattacaagtactttatttagatggacatcagcttcattttgaaaggatatccctggggtttgctgatcatttaactttcattatcatacctgtcaaccagtttccaccgctaaccaattaagtatcaggcagaagagccaaatcagaggggaagattggtaaaatcagtgctgaatgctttaatttcagtgggaaaaagtagagttgatagatttttgtcttggctgaaattggatatttagagtaacttaatgactactggtttatcagtccctctattttttccccctacttttgaaaaggtttctgccagttccatagacccagccttggatgaagttaataaaatttgcaaaccagaaggaatttcaggatgagattgattgtttttgaaatctccacttgtggaaagttcttttcatattgaaaatagtctctcatttttttgttcttattggaacatctctttttcagttctattgggaaattatagcatgatgggtttatagatactgataattgtgtgttacaaacttcagcatgctagcagtcaatgaacactctattttcaggacctattatgagcaaagtcctaggggaaatatctaatgtgtccttgttccaagttgttctaagagcttagtaagagggataagatttagacctaggaaagggaaatgtgatgtcagtcaaatagaatgtaggttagagttgggtagataatgcatgagtgtgggtggcttccttgagaatttgagaatttaactctgattaaataaatgtcatatattttatgtaacatttgagtataaagtttggtatttgacattccaggagcttggacttgagagagtgtttaacatgaagtgaacagattctacatagtgtaaagcctcctatcaggtaagatgatgcgaggcactacaggtgcctgggtgatgatcagtggtgttggacaggaagtatctttgagctgtgccagtggagaattcttttttggttcctataccaagcaggaaaggatgatccttaaggaaagtactttaaagtctcttctatcaccactacaaaaaagaacagtttgtttgagcataagaatgctccttccagctgagacagcacagacagaatgcccaggtgacccccagctgtgacagctgtacacagccctcccagggttcatagcaaacagccagtgctccaagactactttcatcaaatactcagccaaagaccaaggctctgtaataagggccctgatacaaacagcagagatcccagctgagctataccagcctacaaaggctagtctggatttggaaattagcaagaatgagacttggattcagcctaagtagcttgtagtttggttaattattgagctacaaaaacagacagtgcaaaaataagggtacaagtaagtgagtgtatgcagcatcttcccaggacctcccaggttccacacagaaatgctcccaaattcggtaatcaatactcatgcctagtgggaaactcaccaagtcagaacaacaaaagctagactcccagtggtgaggcctaaggagctctcaaatgtctattccccgctatttttgaggcctttactgcatgccatagttgcacacttctgagcattggcctctgcagctggacgagccatggctttccatagaaccacagattttacagagagggaaggactgggccagcaaagagcctccttgtgcggccacattaggagttaaaggtgctcaccacttccctcatgaggaagaagcatgtacggacagaaaaatctcttcatatcctttatggtttgttttgtatggattctgtgtactataaagcgaataacatttttataacagaatgtggattgcaatatttccaacaaatctttttgttcttttcatatgtttgtgagttaaaatactgcatccaggtataaactcacacaggcagaagtttcctcgccatcaggtcaagatcctggatcccaaagagggcaaaaatgacaaggctttttggtgtctggcatggacttaattagtggtcacttttagattctaaatctaagttttacttcagcagcatcaattaccttttgtctagtagtccctcaggtaacagtattggatcagataatttctttatgtttggtgttttagggaatttctgaagtttggttatctgagaaaaggcaggatatcaggatgatgaatagcacagactttagggtcaggctgcttgagtttgaattcgagcgtggcattttctagctgtgtgaccttgggcaggttgccaacctctctgtgattcagaaatggcatctgccttatttggctgttgtgagcattgaatgagttgctgtgttttgaaaattcataacagtgcctgacatgtgtttgctattattatttccaaacacaagactcttttgtgaagggcacagtattatctagactgctcagggtttgcctgcttctgtcatatagaatttttgaaaggagcttgtttcttaactagctttatggcaataacactgtctgtaaccactggaaccagctgatgcattatccataatcctaatagcaaaatacagattcaacgtcttttactttcttaacctcatttttcacagtgttacacgattttgatgcaggtcttctcagttggtcctcccatttttcagacatgtgatcaatggttaaataatgacgtaggggtcccttagcttgtggttgcagcctgaatttgaatatacacgtctttaggcacttagctctaagaagtgtccagtaaaacataatgttcagaagtaaatagcatggaagaggtctctaactcaaatcttgaaaggtctggtctgcaattgtggaaggtgtcttatcctttaatgacacttgtttatgagttgggatcttcagcatagttttggtttttgcttttagaactttgaaaaatctatcagctgtcacagatacgatttttgtcatctagctcttttgagctctagggatctgccttttctaaatttcataatataatgtggctatcagttctcaccaatgaattgaaattaggcttttcatgtgcacaatgcaaacatgagaaaccgtagtttgttactgagtaatgaaatggcaaataatcagttcctggaagcttttaggagttgtaccatgcaagatatgactacaaatcatagcctgagtgcctggacacagtgattttcatacccagccatgtatcctgggtagagcctttaaaaatgtggattcctgggtccattcatgacttgggaatccatatgtcttatgaacagaattatgtaaaaaatttcatagtgattctgatgaaccactttcccaaatgacacattaaaataatttcaaaactctagagtcacatttcaaatattaacattaaagcatttggacactggtaggaacttacattctaccattttacaggtgaataaattaagactgggaatggtgtagcaattttagggtcatagaggtttagagcaaggagcaagtacaccaattatctgatatgtcattggcgctttataaatgaagaaaatgaaaaccagtgcagcaagtaaagatagggctgtcatagctccccaatgcagcaacgagagctatagcaagaacagactaacagtcttacccaagagtcgtgggtacatcaatgaagacggcaattagagggtaaggcctagggcctatatacccatccagtggcctacacagatattcgaaagttgtcttggaatattatacaattagagaaaaaaattaatctgagatgtcatctgagtttggagtgatcttgttgcttgttaatgggggagttaacagagtggagggaaaaaacatttggctgagagctgggagatctgagatctcttctcatgtctatcattaattggctctgtggaaccgtgtgtaagtcacttaacctcttctagcttcagcttccctatctcagaaattacagtgataatgtctttactaagtatttttcagaattgttgtgagtatacattttttaaatgtacagaaattttagattttattgtactaagatgtgtttaatggcaaaaactaaaaggaaagcaaatattagtttttcttttcccaggattccctatcaagggaacattttgatgaggaactaggtctaaaactatatttatttcttttttttcctggcccttatgttaaagattaatttaacaaacattcataaaagtgcatattatgtacaaggtgctgtcttgcactcaaggaataggattttattaatcctcttacatcagtcagagtccaaccagaagacagaaaccacacagtaatttgagtagggtaaatacaatataaagcattagtggtgtgacaagggattggagtaatgagggattggctagtaagaagtaaagagaactctgaagaatagaggagtagcaagtataggagcactcactatgcccaggctgagatagagctttcaaggaagaaataggtctcctgtacccaggattaagatccagaactcattaggaagtgcataatcatggctcactagatggtagaggagacatcaaagtacctcactggcagaagttactgcaagcccatcttctggagtgctggagaagctgttcacagagatgggctgggcctccgaatgtgcagcaatactgtctcagaagttttggggaagctgctgggtgctaggtggggctggccacttcatgatgcacaaggtagtactagagaacccatccatggtaagggctggatcctggaaagaccacatattgcaggagcctgttgagtgcagtgtcttggaactgggtgggaaaccactgaaaatgtctttttagtgccctttcatgatggtgctttgcttacaccagctggcaaagagaaatatttgaagggccccgatctatttgtgcacaacagacaacaaagggtgaatatggagcttcaaaatcaaaacattgataactggaacactttttaacagttctgtgaaataggtactattattatccttattttatagataaggaaactgagacacagaaaggtgaaacaacttgcacaaggaaggtcacaggagtaataaggagcagagctagggtttgaacctgagtattttgactccatagtctactctgaattcctcccctgtgcggcctctttgtctccttcctcaccggtgatgcatggtcagtgttatcttgcattatcctgtgactttatatgcaagtcccactacacttgaagattgactcttacatttacagacatctttaaagtcctggaactatttagcacaaagttttcttgatactttttctgccttaactatttcttctgcttgtttttgatgtttcttcaatttctgctacaatcatgtgtccaacccaaacctcaaacctactttctttttagatttcctgatgcaggtaaggaaggaaatgtgaaggagtggtttgatcttctctgtaacatttctctgttttctgctatcttgccacactagttcagacccatagaatttcttgcctatgaacacggcctgcctagcagtctgtctgctgcccatttaaggtccggttcatccggaacaccatcactgcattagccttcctgaatagctgccctggtcacatcaccactctcctcagtaatctccaatgcttccttaggcactgctctattaaagactattccctcagttcagcctgcaaagccatctacattgtggtcctaagtagacagctttccagccctagctctcctgtcttctactagtgcctattcttctgcctgaagttgctattcagtgtttcctcaactttgtttctgccctgcccctgcttcatttcagggatgcattatgccaggggcttttctgtccccatgtgtgtccaatgtcacccatcttagatgtccctctttccacaaagcctttcccatttccaaacaatcttgttctcttttgaagctctagaatgctatatttttctcttgtagtattgcttcttaggatagcagtactattctcaacctccaccctattattagatcacaaattccttgaagactaaggcaatattttactagtttttctttctttcttgtttcctttctttcattttgtttatatataattgtatttttttcagtctgagaggccactaaaataggtttcaaggtgtggattttcagtcaagttcataagactcaattagatttactgagcagaaattttacttagaaaaaatgtagaacagggaactcacctatgtaaagcagcatcatcacagaaactgcagccactcaggagcagtttctatctcttagtcatggctgggacatgtttttgtctaagattaatagtaaatgaatggagaacaaggcctatcagagaaatcacatgctctgcattcccttgatgctatggactgaatgtttgtgttgcaatcctaaccccctaaagtgatgatgttaggatttggggtatttggggtaattgattcatgaggatagggttctcattaacaggattagtgccttttcaaaaacagacatgaaagcttgctcttgttctctgctctgctaagtgaggatataatgagaagatgggcaactgaaaaccaggaagcagatcctcaccagacaccggatctgctggttcattgaacttggacttcccaacctctagaactgtgaaaaataaatatttgttgtttgaaccaccttgtctatggtattctgttgtagcagcccaaacttactaaggcattcagtttgaatgccctgctagctacacagccctgcaagagtaagggacattcactaccatggtatcctgcacacagtaggggatcaaattttttttaaattcaattttttgtcattttttggttaaatgtctgattttacagtgcactgaaggtcagtgttttcctcatattaagtgaatgccaggtctctgacctactgctggcttgatactttctatacgtacccttaactctctgtttctaattctcagccccattgagacctccagtcactgcttggttttcaaaactttcctaataatttggactcattttcagtgccaacaaccttcttgatctttgaaggcttgtcttaacctcctctccagttctgggtcctttatattgctctataatttgccccagagtagcctgactggccaatatagtcatttgtgagcaatataccatgagaatacctatgcctagaaataaataatagacctcaacattgcagactggatttctgagccactcagcaggggttcctggtagaagcaataaaagaaaaacagtcttaaaatcacattttttatattagcaaatctaaatctaggggatatcagagtgtgtacttatcagataatttccataatactttttgtaaaacttgtgcccattaggtttcttatgtgattaattggagatttcagtttgcattaaagttttgcatacactgaacattcaatcattcaataaaagttagttaaataactatgttaggcacatgatgttctgttctcaattactagaagtgtcattgtttgctagaaaattgactctgaggagcatgcaggtgtttctgtgttctaaactttgttgtgcataaaaaccacttcccatgcaaattaaaagtgtacatttctgggaaccattttgattcagtagagacagaaatgggcccagacacctgcatttttatagtgtccatatggttctgatgtatgtgatctgaggaccatacttgaaaaaacaataaattagtctttaccaaaagcattcaagagtttcacagttttagaggtactttctgagttgaactccaaaatatccttgaggaacttagagagatttttaaaaacaattttattgaagtataatttatctattataaaatttacctattttagtgcacaattcaatatttctaatacatttgttgagttgtgcaactgttgttgcaatgatttttacctcctcttccttgcctggattgaaggaattctgttactccaagggaagaccaaagagtcaaagacccaagtttgagttttggctacatcatccagtgtcctgagacctaggagcaagggacatgggtctttccatgtcttagtcacctcatttataaaatggggatgctattaatatttcctttataggatacttgtgaagattaagtgagaaaagatgtttggagtgcaatttgtaagtttattcaactatctagtgaatgaatacctacctttggttgcttacttgctggtctaggaacagactattaatgagtaaagacagataccatctctgctctccctgagcagatagccagtagggacagtgtgtgtttgatgagaaaatacagcaaataaatttgatttgagtgggaagacaggatcctgtttaaggaagtcagagaagttttactgaaggaggtgatgtttgagataagagctaacagattaactggcattaattaggcaaggagatggtggtgctagcatatcagggggaaggagtgagggccaatgcagcagagggtacatggaacattacaagtatctgaacaaatgctagggtagctgcaacatgaggctcaatgaagagggtggtgctgggggcaggcaccagaccctgcatgccctgcagctcatgtgaaggtttggttccaatccctgaagggctttcagtgtgtgtattttcatgagcatgggtgtgacatgatcagatttgcatgtcaagtgcccaccccgggaagatgaaaggggagtaggatgagggcagaggtcatcagaaagccaaatgggaagctatgcaacagttcaggtgagagacaatgggctaaggtagttgtggcagacctggagagaggtgggtgcagaagaagcagatttaagggatgaaattgattgggtttagctatgggttatatttgggggtggcgtggggagaaggaagtgtctgaatgactattagatttctgacttacataattgaataggtggttgttaatacattagggcatggaacacaaagatgaagaatttgaaggtgaaggggtagatcatgagtgaaacagaagcaaagcatttacaccagtgtttgacataaccagggatagccactatgatgatggtgataattttaagatgtcattgaagcatcctagtgaacatcttaagctgtaatgagctatactattattatcattactttggtcataaaacttggcaagcaatattttaattcatgttttaatttcttaccgcatatacatcaaaatcacttataacatgaatccttctagtagttcccccagtggtataaaagcaggattttaccgtattacataggtgcacatgtttcataatcttctaagtttattgattgaagctgaaagctgcagctagatcattcctcagagtgcctctagggagtgttacattagaaagataacagcaggcttgtaaattagtacagtttaccaacccacaaacatttgtcaccctctcccctcctcacaggagaaaataagcagtctttcctcagcacctcctgcctcatgatttgtttggcataaattgctacctgccttgtggctgggcagtaagctaatttaaaggctgaatgagaaagctcagaaaacagccagagtgttctattgaagtagacggtcagtcaatagggaaaaaagggaataagctgattaatgataaaatcaggaacaccctttgaaaagaatctttatgctttgtcaagctaatttcagtggatctcatatcactggtcacctggtacccatccaatattcctgatttcaagtttagacagttctcagtatatcactgtcaaatcatgactgatattcctttcagtggaacaatactcagataattgcaatttagcttttctctctattataaatttagttgtctctttacctgtgcaacaaaatcataattagatgaatacctgcatatttataggtatatttcaacccaacagacggtctagacattttctgctaacaaactttgattgattgttaagggcatgtggaatcagtagttggctatgttgagtacatctctgagctttgctttttccatctgcaaaatagaaataatattatctccctcatagggtaattgctggaactaaatgaagcaaatatctgtcgcatatatctgtaaaattctttgaacagtgcctcttacataaaaagcattcattcagtgaaagctatattatcgttaaagagttccttctagctcagcctggggagatagtgtgtaaccatttctccatccttggataaacactgtgggtggagtttgagtcagaccaaaataaattgcccttcatttgtgagatctcatatttgctaagcatctttttttttatgtcttgaatgtaaatcctggagttcagaggctacagctatttcttctataaccccagtgtctggcctcatgtgctgcaaagggtctaagttcaatcactgtttgttgcatcaatgaatacatagcacagtgatctgaagtcttttcattggccctcaagtctctgtggaaggaagttagggtcttgtaaaaggaaagatatcagtctgagactattaattttatgcctatggtcatttggggaggcgggcacattagaggaaataggactagatccatggccaaagataaagctcaaacacaatttcttgtggcataatccaaacaagcgatattcgtaaaaacaactccatatctgtggatattttcttgtttttagatgaccaaatttgtctgaaggaggcatgaagcaccatgaagtaaaaattctaacacttggtgtaattttgatatctttattaaatgacattatccattagtgcatgactgctgagcctactgtttaccagcttgaggtgaactgcaaaacttatatatcttatttaaaaattaaaatgttgattctacagggttatcaaagaatctaagacatgatgatttcatattgcaagttatgtaaatggaattaattttggaagacattttgtacaatttaagtagcttatttccacattaataaatatgatgtggtggctaggataaacaccttgctttggaagagcacgtttattttccaaagacagtgttaacttgtgccctgtcatagagagtaacgacatatgtggaacatctattctctttatttctttcttcttttttctctctctggagactaacgtcttcatttacctaaggtctccagcaattggaggcaatcgtaaggaaattggtagtcctctgattcttctgctccattgtattcccccttctttttctgagtgtgtgcttgttagggagcttgcaaggatctacagtgggcagaagcttgtgtttcatctgagagaggagagtgacaaaaggggactaggaaagtcaggcgtgacatgtctatttggtgtgatctgagtttcttcctgtgtttttcactatgggcttcactcacacccatgaaacagttaacacatgttccaacaaaagcaaaaccaatgtgaaaaatgtctcatcaatgcctttgtgtggtgagcaatgggaagctgggcaacaacattttttcatgtagctgagaattagcaatgattatttcttcttaaagcaacatctgcttaatgacagctcttttaaacttcatcaggaaaaagtgagtgaaaaatcctgttataaatactacagtgaaagattctatttagatgttcactgtttcaaagtcactagctctgagctaatcctaagcttcagaagcttactgtgcaccctgacatgctgactattcaaatgggtctctctcaagatggctgggaaaattgttcatatacaaaggagctcagctttagcacctagtggggctgaaagccaggtgtgacaaagggtgcctggggaggccagagagataaacttgacattttgcccattttcaacattgaaatgactgtttataagtcaatgatgaatgtaatcatagtcttaattagtaattactaatgtttatcattatacacaaatattaagtgaaatactttcacaaacattattttatataattttcacaactaccttctgaggtaactaatatgcctgtctcacagatgacaaagttgaggcatagggaggctgagacaattatctgtagtagaatttgcactcgaatctaagattaaaaaaaaaatctacatgttctgcacatacaattctagcattagccccactaacatatagggccacaggggaaagtaaaatgttttaaaattttttaaagtttggtgactgaaggaatattatattttggttttaggtagaatgagaagtgtgggcacaaaagcatggaaagcctgctcctttttgaagaattatacaaatacatagtcatataatgtataggaataggtaacttttaaaaatactttatatgcgtatgttcataatgtatgtatttataaccactatcaatattaatttaaatattctgttataggttcaaactgagggattagtatatatttaaggcatttgccactctacactgaaagtatagtctctctcaataggcacttgctttttggctccaattcattttaagtttgaacttctgaacccttccattggaagtttccatttattttgtcatgggctcttgggaaataaatacctgtagtatgctgctactagtctgatcttctctgcttccctgaccttggatcaataaaggaggggtcaaagtagatgttctccactttgcagaaaaaccttattttaagtagaacaatagagcttggtttaacctggaatccaaaaagaataggacttgaattacaattacaggcaagtcttctaaaaaaattaatgcattatgtatagcattaaagaattattctaacccttagtgataacaggcaatctggggcattactcatatctcatttgtaaatacttgctatttttccaggctttgtgttggtgactttctgggttaattactgaagagtctgttttcttttccatagaggccacaactcttgggacagaggctgccagccacaattttgcatttcctttctgcatgtggaacctgtcctgcctatgaatgttgtcccagcctttgatttcagatttctgctgcatgcggcctgggctccactgctgtctggcaccctgctccctctctcagatgtgaggctggtgtgtacagtatagactgaccctcattcaactagagaccttgacatatctccttcactctgtaaggagtggagatgaacagcctaatagtagaacaaaagaagaagctgcacattgtacccaaaggatttggggaagacttttccacctctcttccaaccccctggccccagtgaacttgtagactatatgtcaccatgcgttacttttctggcaccagtatactacagcaaataacaattatttctgttctgatgctgaattagattcttagctttaaatcctctcacacacagcaagtttgtagaccctactgaagattctggcacaatttcagtcctggtgcaggcagcttcaataagacatggtccaggggactgaattgaaggcatattttcttttatcaaggttgactgaaagaaagtagccaccgggaggttctgacaactcaggaatggatgaccctgcccagtagctctggcccttggcgctcagccagggcagatgctagagatgagtctcactacagctgcagatgccaaagctcaagatgcataatcctgagcttgacagctgccaaactagccccctgagtgtccaaatgagttggctcttctgaaggagatgacaggaaggaaccagagggattgctgtggctcctctccaaatacagcattaaaaggaagccaagagaacttagcaattttgcctgtattgtaagaagcgcaaagaatcatgtgataatcttaaccaactgttatttcagtggttggaaggggttatgagctagatcccttatatttttgtaaccctttttgaattttaaaacattcattaattccatcatttgacaaacatttatgaaatgtccactgcatgacaaatagtgagaacacagaggtatataaaggtaaaggaacttaccttaaggaagtgactcttaatctttttgaacacagtctaattagaaggggacaatactgtggctcatcaactctagcctttccccttttggtaggggatatttgagagggtgattatgatgaatttactttaggattagtggttcgtatttgaatcatagtgcccagtctagtaatttaaaaactagaggctaaaatgattttgatgcaaatacacatttcttcatactataaagttaaccaagtagcacaaagtaaattaacaactagaaagttaaattaatagtatttcttactaacggtaacaaatacaaaccacccccaatttattgtacccataataaagtgttttctcccaactgcaaaattctatctgcttatgcatgtgtagaaaaggagcgtttccatgttgaacagaattgcatggcagccagacttcttagcagaaaaccaaattagaattctaactacattcttagaaacagtaattttcatttacaaacactaaatgttagaaacttatgacacactggatatattactagcaagtaatccttagtggtacaggaagatgaagctatacagtatcgaccctcagtctctctaaggacctggaaaaaggtgttctttctgagtgtgtacagagtcaatatgagaattactaaaatagaaatatgcatgtggaagacatcatagaagaaggagggaaaagtgcccaactacccaagtaatgagagaacgttacttgggactggtggtctttgaatggggtcatgaacatggaataggaattttacaggtggatgaggatgcaaaaggaacagtccaggtgcaggaaacagaatatatagggatatcacagaatagaatgaagggatatcacagaatagaataggttctcagtctcttacctgcaattctgaattccccacatctttaaaaactgaagggttttcttaactcatgtggcaacaaaattgaccttacgtgttgtgaggctacatgtagtttctacttatcagcattaatattcacatatttggttgcagaaatattaaagtgttgattacaatgtataccagtacatcctgctggaggttttacttaatagatgctacatgcatctatttctaaaacctgaataattttgaattccaacacacctggccctaagggcggcaggtaagggattgtatacctttgagtagctaccaacattgcattatggtttgggggaacaaggaacatttggagatgtgattagagataggatgaaaaaggtaaggaggagtcatctgaacctcttgaattccctttgagctctccactaaggctttcaagagaaccacctatgtcctatggtttgtcagacttgcctgcgtcttgctccatgtattcgttttctagggctgccgtaaaaaagtagcacaaacttggaggcctaaacaacagaaacgtattgtctctcagttctggagactacaagtctgaaatcaagatgttggcaaggttggttctttctcagggctatgagggaaggatctgctccaggcctctctccttggcttgtagaggaccatcttctccctgtttctcttcactttgttttctctctgtgcatctctctgtgtcccaattgttcctttttataaagacataacagattggggtctatcctaatcatctcatctttgctaattacttctgaaaagactctgtttccaaataaagttacattctaaggtactgaaagttagaacttcaacacaagaattttggaggtacaaatttaatccataacttaccacatcttgcctgccttcaatacattctgctttttatattagtaggctgaagctataagtgttgcttctccttcatagactctctctctccgacatttttaaagccttattatttgggaaacgtacaagttatttttctcatttaaaaaatcctcacttctaaggatgattcagagaggttcagtgacatccttgaagttgcacagcgaatagcagacttgggaatcagtctcaagtgtttctactactatggacaagcatttggcttttgcccaatgcattggaaaatggttaaaacaaaaagaagagtccattccctgatgctacctcaggatggtagataaaacttcatatcccccatgtgctgtgtgtgtcatgattgtggacttatgaaagttatagggtctatgttccaagtgggtagatcccatcatctcattggtcttttagactcttagcttgtgagataatgtaagttctgtacatctctctgatccaaacagacactgtgcaagactgcatattaattttttaaattgcatgctattctttttcaccaagcggatgtccatctccactccacttcctgcccctccactcacctccccttgctacaagtcagtagttcagttgagatgatttaacccagattacacactctaaaggaaatttactttactgtcttagtttccaaatgttttacggtcagtttaattcatatggcccatatgtcttctgtcccacacagaggcagctgcatacttagtgccttttctcccttcccaaagaacattagaataaacagagcgttgcagaaagtgatgcctgtgtgtatgtgtgtgtgtgtaagagtgcacacatgcaagagatagtgagactaagaaagagagattatagtttacaaaatgctttccagctaaaatgaccttttaaaggaatttctaatctagctgggctgaaaatgtttcccatgggggatgattgtaagtgaggcaagaagtctgcatttctgggcagatgtgtgtctaggtgggaggtgggataaattagagaacagttctgcagcatgtccaccagtctgtgtgattttgcttcatcatcatcaattaatatttattgagggatagatcatgggacacatggtactgtatgctgctccaaaggctaatattttatctcctgccatggattcctggagagcggctacatttcacagctaaattgtggatacttgaacagttggttaaagggattcattcatgtgttgtttataaaaatgcttcacattctttggaatcaagaaaagcttttatgaatcagtataattttagctgattatcacagagaggaagagaaatgtatatattgcaccaaaagtagtttgctttaagaatagattaataacacaactcatgaattccacattactttttaccatggtgttctaaagggctgtaaataagacctaatgcataaatttggaatcattgttgagaaacgtttttattgcaggtgttatcattttcctcattcaacaattggtaggcctgagcgttttaatcacgtctgtaaactcacatgtggaacatgaatctgatcacatcagccctctgagccaaagcaaattgaattaaatactaatttttcttctgtatggcccatgggttactcattactctgctatcttacctaactctaaatcttcccttcttctgttcttaccacctcatgttcccgcagcctctcacacactcatgcatacctatctggtgtgcatgcaccaacttctgtcttagtcatatatttttctgccaccaaaccttcgatttgattgtttactcatctgtaacaccataggctattattcaaatcctgcttgcttaagtcttggacatctttaaggagctattcaaatatcaccagttatcaagaccattttttgatgtcctttcctttccatcattagtaacctctctatttttacctctttagccattactcatcagttggatcgtctactatatctctttcctcccgcctccgcaatttctcatgctttatctacttgggatttgcttattagttgctgaatatttcatgttactggctgggtgctctcgtaccttaaggcaatagaatcatcaatcaataagaaaccagttactcagaatatttgtttcgttgtctactgtgaagtaataaacacaaagagcattacagtgagcatcaaatgatgatttaatactgtttttgctgattaggaattaaattgttttgtatgaaatgtcatttgaaagtcttcagatatcacctggtgctcaaggatatcttgatcctgctggggtttccattaagttgatcaataaaagtgatggttttgtcctcgaggaacatacttgcccaaggccaacagcagaatgggggaattgcttcatctaagttattcttgcctttattatatactttcagttattaagaggaggtagaactctggagccttttgagtttagaactttagtgagaagtggagagggagagaaaaagaatgaatctcttgttacttattcccactcaaacaggtttgcaaagctgtttattaacaacaaaatcatgaacgactatagagagagccaatgcccagggtgcagaaggtggatggaaagaaagagggcagatcttttcccttcatgatgtgtggtctggccatcttaggggcttctgtttttgttttgtcctttagggtttaattagataggattcatcattgaacatctaagaaagcatgtataagtcaataaattataaacaaacattaatcaatggattgatccaatccacaaatgtactgagcacctactatgttccaggcataataaagcaccaagaacacaacagtaaagaagatagatgtagcatttgcctttgctgagctagcaaactagtgtgcatagtagtgactcagcagtgagcaacagtggcgggtgactaggctgttacaggggaaggacagggtgttgcggggccacagagaggtacctcacccagatttggaggctcagaggtagagttgtctagaaattgggactaaagggtaaatagcatttaactgatcagagtgaggagaagaggattgtaggcatgtggaggacatatgtggaggactgggatgaaagaacatggagtgtatgactgttgacatggctgaagcatagaagctgggggcacagttcggtgctgtcagatgtaaattttgtttctgggggagcccatctcctaggtaggggagtaagaagtggagtctggagtgatccttgcacatcagtgtttggttatgttgcttaagatctgactctgagtttgaagcagacagatacacaaggactgaagggatatttctctttaaagagaacatacggcactggattactgagccctcccagaagagatctctcctcatatttgtgcctgggcttctgtttacagaaatggtggagcggaggtcagggaagtggggagaggaacaacattgatttttcttatactctacttgggacatttacagaggcagttcctggcaattctttgagataatgtaacataatgcactgggagagagctagggagataatccctgacatctctgaagaaccgttaggagtgaacagagttgcctgggaccatgttttggtgaacagaattgtttttgaaattgagtttcacataagcttgatgtcctgaagcagtttctttccaccactgcaatattcatcaaacatgcagataaaaggtagacaggaaaagcaaattcttaggtgctgaattttagtagctatatttgtgaaactttgtaggcctgaggtatgccttcatctaaattatgacagtactttgtacatagtaagtgtaaaaaaatattattagattgaagttaacatttgaatatattactaaagggtacaggtcaatatgaaattcaaggaaaaacccagacttattttcttccatattaagaacgatttgtttacttcttttgcattattcctacctggtactgatcaggggcctgggtatgtaatatttgttgaaacatggaaggagtgtagtcccaaataagagtagcataaatgtcttcatcatcaacaacatagttattatgtctcacattttcaaggtattttattatatacctaacacataaaattattaaaaaagaaaatattgatggcaaaaacagaagaatatataaagcatacatttatttcctagctccaagtagctttccgtccccttgtttatagaggcaggtcttgctgtgttatgcaggctgggttggagtgatgcaatctcactgtaacctcgaactcctgggttcaagtgatccttttgcctcagctccccaagtagctgggactgcaggtacaggacaccacactcagctaattaaaaaaaaattgtagagatgaggtcttcctatgtctccccaggtggcctcaaactcctggcctcaagcaatcctcctgcctcagcctcccaagtagctgggattataggcgtgaaccactgcacccaagtagctctttctaatccatgggttttggagccacataagcttgtgcttaaacctaacagtttccactgttgaagtaatataggggcaagttcttaaattctttatatctccttccccagcttcccccatcccctgttcattttttttttctccccaaaggctggagatagtgcatgctgattttgtagttttgtgaagctatgaggagattgtatctttatgtaaagcatgtagcagagtgcttggcatgggtaggctattgttatttgtctcctcaactttccattaccctttcctttgttctgaagaatcaagcttctgagcagtatggctaagcctcattagtattatctcatttattctgaatttgttattttgccaagaatagacaatatattttgtatactctataagggaagatttccttaaataaatgaatggtgtaaaaaattataaaaaaggtattacatttactcaaaaaacacctttagaaagtgtgaggcaaatgacacaaacattaattaaagttgccccttcctatgtagacagtccctaaaagaactgagtaatatatattctgcaattcacttgtttaaattcaggatagcttagccatgttgtttgatttagtaaaatttcctacagtgtttcccaacattaaaaatgctattttgttttcagcaatgaacacatttaaactgaagatacacttaaactaagggattccaaggaaataaaaggactaggttatacaaggaaagagttctaatatggaataagcattttcattgctttttttgctgtgaaattgaattgtcagttttcctatcttcataaattgcaaaacagcattcatttccttgtgccttcttctctctctccctcaccgctccttatgtttttacctttccgtatgcgtgtgcattacttgaaagccatgcatgggctgaaggatgttgcagtagagaaaaataagaaggcaaacaaaagcttattgaattcactgtttgttaacaagaaaaaaatatatatacacatacatatatttatacacatgtatacatacaaatacatgtatatgtaggtggacatgtacttgcatagacattaatgtatcatttgaaatgagaaagtttattgatgaaaacctatcatcttaaaaatctcactgccacagtagctacagataaatttctagtgtttttcactatctccatcataatgtttataaaaaattatttatataaagatgatgcataatatatatattttcattatacaaaaagaatggggttataaaccccaaattcaaaaatgagaaatacggattgaaaaaaactccttgatcatgtgtcacgagaatctggaataatcttccaatctttcatgctgacctggattaggcactcagaaaatccattgccgctatccatcctctcctgccagtagtagctagacaacccaaatataaggtttttttgcaagtcactgtctgactttttcagacaattcaacaacttctttttaaggggaaaagcagcagcatttgttttccttcaaagcattcttgttctatgattgagatgacatggtttttggactgctccctgcaggaggagaagccagacggaaggtggctttctctcagctctggcaattatagcaaagtcataaaaccccaggtaaatgggaactctttaaacatttgcagatataagtccgacacggtaggaaagtgacccaaagggaagtgcttattgatccatttccccccaaagctgtcagtgatgaatgaacatcatctaatttaataggaacagctctaagcctgcaaccttgcaggtattctccctggtttttcttgtgtgactgtttgaccatgcccaagaaacttaaccttttcagtgtcactcttcccatctgttaatggggataacagtgtttcagttctgagccttcttatctaaggtagctcaggagaaatatgctgttgagttgcattgtatcataaacatatttcatgccgggttttgtcacttcattttctctttggtaaggccttgtccatcactgcagaattcattctgtccttataaagcagtgaagggggacatttcaaagttgtggcattcacatgcagttgattgagacagccacaagaaattctgacatccctgccaaattcatttgtcttgtaagctgcactttttctgcagctagatgttggagcaaagagctatggaagagacataacttgatcagatgatgttttctctgtcagttttcagattaaatccatcaataaatacttcctagggtgattctagtatatatgaggtgtagttctagaaactcaagcagaatcctgaagatggatatgatgaatgttttgcacttaaagactctagagtgctcagacaagttagagccactaccaaacaatcaaagtgcagtttaaacctgcttggcatcactgatgtcccagtccatttgggaaatatgatgtacactcactgtgatagagagtgccggggctcatctacatccagttttcctattctcttggaacatttgccagtgctatagttcccagcccccttgctgttaggtggaactgtgtgatgaattctagccaattgcatagtagtgggtgggatgtatgtcacttctgggccaaggcattgaattgctgagaaagctacctccaagcttgctttatctttccccaccatggtatccttgaaggccaggtgttgagatggcagcattgccagatggagggagctgggatctctagttgttgaatgatggagagaccctaataatccccactggactttatgtgagtgagaaatacacttttgaaggggttcgcaattgagatataggagtttttagacatcattgcatagtctggcctattttgactgattgaatgttaaatcataagaattaaatggcaatgtaagacaatggcagtgtaactgtcacaagcaggtagaaaaataattaccaaaaaagaattcaggtgaacaagcttcctcagcacatgggaagataaccagtgtgggtggaagcgatttgaaggatatggagatttggataggaggaggacagaggcaggaggagagatagcctgagaagaagacaatgagatgatgttgtgagccaagactacatggctgcaagggagagtaggatactgacactgctaccttggaaaagggaagaaaaaagaaagataaactttgttttattgaaatactaaaagctataaactcatacacatataggtagttattgttcttaagaggcattgtttcaaaatttaggactacaatgcattactgacattcagggtggagaatatcacagttgattatttgaaagagagcaagacaagttacaattgaacaaagaccataagaatccctgggcaataggaggccgttcttgtgaaatccaggacaccaagcatgagtctagctctatcccttggtcccattttctgctgggctagctctccagttgtgtgcagtgttgacaatgcaggcatagcattcattgcacagcattgaggcctgtaaatcagctagttcatacaattgaatgtgatgactaattatgtccaacattgctaaaaagtcccttagaaaatggatctaatttgttttatgtagttaatattattttattgagtatgcattattgattttatagagtagacaattctttgagagacatgtttatgaatttgtatcagctctagcaccgtttttttaaagcacaggagatgccagtgagggacttaaaattcaagtcctcattttgtgattgttaattttattccattgtcatttagattaatttcctcctgcatttcagaaaactaattttcctatttaaaggctgaattgtgagcccaagtctggttccctcagcctatatcttccataaatgccaaagctggattcattcctgcttcccacctctaggtccagccctaggtgcaccctgtccttctggtggagacagtgattatattatgatctgagttcaaaggcctgcaggctctgtagagtctactttgtacccatggggcttccccttagaaagtgttacaatgtgtcacagagcattggctatggagacagatgaacctgaatttcagtcccagctctgtcatataccagctgtgtaactttgggcaaatacactttttgtgctcaagcttcctcatctgtaaaatgggaatatgcaggtatactagttgtgagaatgctaagagaggatgtgtttcatgtcagaagataacaggcatgcaaaatgattgttggatgagtggatataaccagtaatgctggcacagtttagtccagtacttcctttgactgcactggacctgactgaggtccatctcaagcccatatcttccagagttacagcagagagcctattgttacctttcacacttggtgcctcataacaggcacactcagaatttctaatattgggagatgttaatctgacctcttctggcacctgtatattgaagctggggtccccccaaccaggttttcactacatgaaaattcttagagtcttttcttctctcatgattgtacaaaaataactgaaggatttgataaatatgactgtacatttgtcctttatgagaattaagtacaattttctctacactagcacttctaaaactgtgtcccaaggaacactaattctctgaatgttctaaatgttcttagagggaaaagaataggattctaaggattagatacatttggggaaacttgggttaagtaatctttttttctttttgttcaggatttcttaaagcgtttgtaaagtaatttgtactaaggagctctaaaagacctgacacagactaggcatacaacaaacatttgttccatgagtgaatgagtaaatgaacagctgagttaaacctaaatttctctttctggatccagttttgaagcctcatcagcttcccctcactcctcacccttcatacattctatatcatgggtctggacatgattgctgtccttccccactaaccatttgcttttgccaacctgcatgcccctatccagaaaatcaagcgtgagagaaaacactagtgtttctcgtgtgtcaaggatacaggaaagctatcttcagccgggcacggtggctcatgcctgtaatcccagcactttgggaggctgaggcgggtggattacgaggtcagcaattcaagaccagcctggccaagatggtgaaaccccttctctactaaaaatccaaaattagctgggcccagtggcaggcacctgtaatcccagctactcaggaggtcgaggcaggagaatcgcttgaacctgggtggtagaggttgcagtgagtggagatcgtgccattgcactccagtctgggtgacagagtgagactctgtctcaaaaaaaaaaaaaaaaaaaaaaaggaaagctattttcatacttgtgaatccttatagaatgaatgtagtgaccccaacaaatcttggtcaatatatatcctcttaaggcttggctcttttccccttgagatgctatgctcttaaaaggagtacctcaggtgggacttacaggagtctttctgcaggatctgcttcagaggttcagctgtcccattttttccttccttacttacactgactgacaattaccttttggaaatcatagcatggattgttcctctctcctttgcccaattaaggggacttttgtttaaaatgacaatgccaaggtgtctgatatggtttagctctgtctccacccaaatcttaacttgaaatatatctcccagaattcccacatgttgtgggagggacctgggggagataattgaatcatgggggccgatctttcccatgctattctcaggatagtgaataagtctcatgagatctgatgggtttatcaggggtttccacttttgcttcatcctcatttttctcttgctgccaccatgtaagatgtgacttttgcctccaaccatgattctaaggcctccacagccacatggaactgtaagtccaattaaacttctctttttcttcccagtctcagatatgtctttatcagcagtgtgaaaatagactaatacagtaaattggtactaggagtggggtatcactgaaaagatacccgaaaatgtggaagtgactttggaactcgtaaacaggcttaggttagaacaatttgaagggctcagaagaagacaggaaaatgtgggaaagtttggaacttcctagagacttgttgaatggctttgcccaaaattctgatagcgatatggacaataaaatttagggtgaggtggtctcagatggagaagaggaacttgttgggaactggagcaaaggtgactcttgttatgttttagcaaagagactggtggcattttgcccatgccctagagatttttggaactttgaacttgagagagatgatttagggtatctggcagaagaaatttctaagcagcaaagcattcaaggggtaacttgggtgctattaaaggcattcagttttataaaagaagcaagaataaaagtttggagaatttgcagcctgactatatgatagaaaagaaaaacccattttatgaggagaaattcaagctggctgcagaaatttgcctaagtagcaaggagcctaatgttaatccccaagaccatggggaaaatgtctccaggccatgtcagataacttcaccgcggtcccctcccatcacaggcccagaggcccaggaggaaaaagtggtttcatgggttgggcccagggttcccatgctgtgggcaggctagggacatggtaccctgtgtccaagctcctctagccatggctgaaaggggccaacatgtagcttaggctgtggcttcagaggtggaagccccaagccttggcagcttccacgtggtgttgagcatgtgggtgcacagaagtcaagaactgaggtttgcgaacctccacctagatttcagaatgtgtatggaaatgtccagatgcccaggcaaaagtttgctgcaggggtggagccctcatggagaacctctgctagggtagtgcataagagaaatgtggggttggagcccccacacagagtccctactggggctccacctagtggaggtgtgagaagagggccactgccctccagaccccagaatggtagttcaccaacagacagcttgcaccatgcacctggaaaagctgtagacattcaatgccagcctgtgaaagcagccaggagagaggctgtatcctgcaaagccatgggggcagagctgcccaagaccatgggaacccacttcttgcatcagcgtgagctggatgtgagatctggagtcaaaggatatcattttggagctttaaaagttgactcccctgctggattttggacttgcatgggccctgtaatccctttgttttgtccaattcctcccatatggggtagctgtatttaactaatgcttgtacttctattgtatctaggaagtaactagcttgcttttcattttacaggctcataggcggaagggacttgacttgtcttagatgagactttggactgtgaacttttgggttaatgctgagatgagttaagactttgggggactgttgggaaggcatgattggttttgaaatgtgaggataagagatttggagaggccaggggtggaatgatatggtttggctgtttccccacccaaaactcaacttgaattgtatctcacataattcccacatgttgtgggagggacccaaggggaggtaattgaatcatggaggctggtcttttccatgctattctcatgatagtgaataagtctcatgagatctgagaggtttatcaggggtttctgcttttgcttcttcctcatttttctcttgccactgcctcgaaagaagtgccttttacctcctgccatgattctgaggcctccccagccatgtggaactctaagtccaattaaacctctttttcttaccagtcttggctatttctttatcagcagcatgaaaacagactaatataatgtctcagcagaagtaaggcacaggtaaatatattgtcgtgcataaacttctgtttcttggaagacaggggctatcatagcttttaattcctgttcttgtaataccagtcaggaccactctgatgataatatctcaccagaaattctcctatagtaatttcccagcagaatttgccccttaccaaaaaaaaaatgggtagaattttcctattaattggtatttgggtaaatcaggtttaatagcttcctcttcctctctcattagtggccaaagtaatattaataactgacattgagtaggagaaggcaaggccattttgagtggccgcttcctattatgtggagattctggttcacgctattgttgcaaggaaccacgtagtgacgtgtcgcctcccatgcagcctcagcttttgctttcttggatgcactccagaggatgaaattctgatccatgcatgatggctggacagtaggcagaagggggcactcagtgaagctcagatggcctctaaattgctttcagaatcttatctgcagtgtatacaactcattttccagctgcaacattttgtctttttggataaaactaacatggctcctccttaaaaaatgacagcattatggctttggcaaacccatagaggggtcaagttagatccacacaatcagaagggggagaccagtgcaattagttgggaccaggacttaaatatttataaatctggcaggaattagtataggtgttccatacttttgaatgagacttttccgtggacctgctaaatggatccagactctggcaggagagaaatgaacttgttgaaattagctgaatctttgtcatgtcctccaaatggctcattcatccaggatccaatatgaaattgtttgacagacattttcctctcctgaagagacctaactattgtaattcaacatggcaaaaggacacccacaacttgatacactttttagtgtgagagatgggaaaagaaggaacatgggatgtggaaattgatcagatagattttaatccactgtcaatgacccgtgacatgctatctatttctaattgatcatttggtagaaaagagtttcctcgggaagaatcttctctctgtagactattttcttcgtgttagttttctttctgtagctgataaaactcatacgggtggttctttgacctagctccaaaagcacaataaccgatggttcgaatgagagagaggagctgtggaagtggggagagaggagtggggaagtggtttcatttacagaaaacagaagctagagaagggagcaaaggcttatcttgcaaagcccccctcctcccctgaagggcaagctttggggcctgtggcagtgcccaccagcagtggcacagattgtgcccttctccatggtacctgggctgcttgctgaggtaatggctctggggggagccagagtgggtggaagtgcccatgcagcttggggctacagcctggacattgcaggagaatgtggtggaatttaggcatgactttggtttgcagaaatgcttttgtttttccgacagattgcatcccacaagtaaacaacatgtacagacacatgattcattttaacatgaaatctgcacagatgaagtgcaaggcataaaccatattgaatcgtctgtcttgttttaagagtctttatctgaaaggatgccttatttgcatatgaaaaatatgttcctttttgcagtggtctcttctccctcattcttctttgaaggaacagctttagtttgctactgacaatcataaggtttactttgttgaagagtagaaagagaccttaggaaaactgcacatacttgcttcatattttaagttttatattaaagttgagacatctgtttttcttgtcccaggtggaccttgaaataaaagcagaagcttatgatacagaagagagtacatgagttttctattgctctaataacaaatttccacaaatttagcagtttaaaacaacacatatttgttatttcagtttctgtaggtcagaagttcagcatggcagcacttgcttctttggttaggtactcaccagactcaatcaaggtatcccatgtagttcccatctggggttcagtgtcctcttccaagttcaccagttgttggcagaatttagctcctggacctgtttcttgtaggactctattcccttgacatatgacacctgtcatcatcaagttaacagtgatgcatttactccttctcaccctggttgtctctctgatgttcctctctgtcacatctctctgacttcttctgtcctttgattttaaagactcacgtgatcacattgggttcacccaaataatctacagtaatatctattttcaggtcactaataaccttaattatatacacaaagtcccttttgccatgtaaagtgacgtagtcatagatatggcaccagggggccaaaattctgcctgccacagagagggattacagcaggaagcacagtataggcagctgtgtgggtgcagtacacatgggaaggtaaaaggacatatgattaagtgttttagaaaggacagtagagataaggagacttgatgggagtcatgataagggttcacacctgccaagatctattgttcatgctggcaagaaagggctccattaccagtagagtacagtggctaagtgtggatggcaggatcaggcagcctgcattcaagtcttggctttgccagttattaaatttattaactcaatcaaattatttaattatattaagcttaaattttcccatgtgtataacaaagataataataaagcttagcttatagggatgccatgcagattaagtgagctagggcatagtctggcatacagtgagtggtcaatacattttgtaatttttattattacctccttttcttcctgaattaaaaaaaatggtccagagtaattacattaagctgagaatggcatgaatttaatttctggcctctctcttctaccagctacctgggtgatctttctttgtctcacaattttgtcacttttaaaatgaagattatgttaattatgctaatcattccaaaagtaagttggtgattttagagcactttgaagtaatcactagttatttttgaaatgtgtatgataatttaggggaaaacaatcctgatttcttttagctcattctgtatcagagtcaccctacaactaatggtagaggcccaggacacttaccacgggatgtagagaaaaaccaatcatcatgaagagcctgttggaagtggacttaccctatggatgggcagggtagctggttggctaaggggtatgagttgtgagatgtcagaaagacaaactgccctcaaatatgtgtgctattaacctgtagcaaatgcctcaaatattaattttagagatcttatcttttccaatattgagacctaaaaagcaacgtgttagaatacaaagaacatttcgctcacaaaaatctagattggttctaggactaattagccacatatcatacatcctttgtgagtcccatttgtgaatgaaggaggttagtctagaatgatgtttgaagtcttctccttcttctagattctgtgaactagacatctaagacctttgatcttggagtataaaaatcagacagccattctggtgagcagcagttgctccagaaggtcgtctctgaggagatgagcaagaaagacggttgttgtagggtttctgcaagtgtcagtgaaaacttgcctggaggggcatgagggaggaggtgagtcaacagaggagatgttctcaggggtgaggtgagagcagagggtgccatgcaggcccttgcccaattgtcagccctgctgaggagctctgactacaggcatcatctattcagacatctggtttgtactataaagttactagcctgtttcctgggctgattgaactctgttggcaaaagctttgtctataaatgaagttaataccaatttatttgtctgaagggagggggttaaattatacatgtttttgaggttcagttagcaatgaggtatatttattctgggatgtacattatctcttttgcttcaaaagaggacagaatgtaacctaaggttttatatgttgtagtttaaggagaactagaatggggatcagaaaacattattttcatctttgctctggcactgaacagagacacaaacaggggcattctgaaacccatcaagattctgttccttcttggcaagtggagataataatatctgccctgccagcctattaagccatgtaaagtgctctgcacagtgtttcacttagtaaatcctccataactatgagctattatttttccagccctggcacactacctgaaaaatttgaaacagtccataaatagctatagagtgaatgaacaaaaaaagggtatagtgaagttcaaagtaacttagtgtgatgtactacataataatgtcatactctatttgttgaatgaagcaacagtttttacatgtacagaaacattgtagaaaaattctttaaacatctcttcccaagtgaggtggatggcataatgtgtcacctaatatcagcgatctcttctgtgagcaccctatgtaactagaactcccttcagttactgtactctctattctctatcttgccttattttccatctcagcacttacttactaacacctgatgagcatttttttgcttgtttattgtctgacttcccccactggaatgtgacatctataaaggtaggttctttgcttgcttttgtaaattcttgttgctgtaaactacattggtagaacaatacatggcacatagtaggcacataagaaagatgatgagttaatatattttggggatgcctccattgtgacaatgacttctcttaaataatcaagctgttttcactctatccaccattacttgcagcctacaatatgttccatctggtgttaaagcagtagcagtatttttctgtgtctcatagtaggtatctcacatatggttggatcttattaccaggacctggaaactatttgtatctgatccttcgtctccttagggatggtcaggataactacttcccaaatggaggtaccctcaatcccaacagctacagtggtgtctaagttagggacaacaccagtaattctgctctgtgctccataaaaaattaacagccataaaagtcaaatcagcttcctctctagcaaatgaactttacaacccgctttagcttacagactcttagtaaccaatatgtaaaaaataccaaccagggaaagatattttcctgctttataggctttaaaaaaaccatttaattcaatctggcacccaggctgaatgtaaaatagctgcaaagcagtattgatggaacaacacaggatataattaaatctatgtatcaattcatccagtgtaagataaaaatcaatcccgctcaaacagacaccttcaggcaggaaagaaggaaagcatttgctgcagcctgcccctatgttgtaccctgttggtttcttattggagcaatactctcacctgctctgaaattatcctttcatattttttttgggggggggggagggggctgctttttacagggctctgaataaaatatgagtttttgagcttccactgcggttttgaagttactcctttctggaaaaaagtgacagaaagcgactttcctatgtagaccactcaggagcaaaaatccatgatctgaggtctgagaccttcctggggaacttgttaaatgtgcagactcttgggctccatcacagagattctgattatgctggtggtggtcctcagaccgtagcgtcatttgcgccctgggtgagaatccggaccctatcactcaaacattctatggccttgggcaagataattacatatttttatacctccgttttctcatttgtaattcaagcttatgcatggtaatgtgctctgggtacattctcatttaatcctactttctaggttagtgtgggggtaaatgaggcaatgtatgttaaacatttagcttagagcctgataaatagtgtactattgccactgccagcagccaggattactgagtgcttgctgtctgaggggcactgttctgagtgctttacatgtattccctctttttaaatcttaggttggtactgctattatacttattttatagttgagaaaacaggcacagagaaattaagtgacctgttttaggtcacacagcattgaggtgatagagcaaagacgagaatccaagtttgtatgacttcaaacaccacatattttacccactatcattatgtattttcagctatagatcacctatctttttttcttctagctttacatctggttgtcatcagcccaatactgaagttgtcttcctggttaatctgttgttcttttataggttctggcactagtatactttattagtgaaaggactcttaacctatgcttttagcatatattctaaaattagaatccatatcataaaatgtaagaagtgcaaataatctgatattctgtctccctcccctataaagatcaacattaggtgacatataggaaaacttagcatttttaaaaaaattcaggttagtgttcatcctcaaggggaatcatgaagaaaatgtttaaaaaccaattgaaaatttagtattgtttatggttatttatggctagcggtattataggcaactcgcctatctctttacattttctgctttttccaaattttgtactacaaagaactgatactattaatacttttataatcagaaagaaattctttctgtaaataaaaagcaaattaattacaaataggacccagtggcattggtcccacgtttcttcagcctgctgttcactcctaagcatgcatcctggtcatctccataggacacccagagaagagctgatcaatattttggtgtcaaggggaggaagaaggagctggtgagagggaatattttgaaattctttctgtgagctctgttagaagtatgcctcagttcactgacgttgaaaattaacctagggtgatcagaggactaagccccagaataaacaaacaagcaagataattcatttttaattttgaccaaatgttaacaacatattgtgcttccatgatgccaaaacttattagtttaatgaaaaacaacatcagttaagtcattggaaacacacaaaaatcaatatgggtgttattctatagatcaagctatcactttatagatgggatttctctaccattcatgtatttgtttatcacttgacatagttagaggtcgctctgagcagatgctggtgcctcaaagacaacagttatgaaaaaatgaagtcggagaaggaaatgtgatgaaaaagtctctagtacccttcagagccataaaggaaccactggaaacattccattttctaataaagtgattactaaattttaaaaaatagcacagtggaatctatttactactaggttgaaaacgtttgggtataaagaaattgtagactgtgtaaaaacatcttccacaccaataataatctcccagccacgctgatgcattaagctactttataataagagttgctgggtagctaaagggataggaggctctggaatgaaggtatttcatatctcatataaaagcatagtatgtaaaatagggagagatgttattgtaagttcctaagaatttggagaagaaaagccttttatttatctgtgtaagctaaaaaagaaatatcaaacaataacagtatcttacatttataaattatcgtactctcaaatatttgacatgatttcaggtctcttttatcactctattcctgctaacagcgctgtgtcaggtaggcattatcacccctgattgatgaggaaatgaaggcattgttaagtcatttgctcaaagttactggtagggcaaaaactacaacgcaggttatgtacctactaaattggagtttatttatacactgcatttttttgtctgtcttgagcatttgtcatcatggcacaaatgtatctgaatgaaacatgaaagaaaataagcaaatagacaaaaagaaaaaacccagtacctaatttgctttgtttacatatcatttaatatttagacatgcccaaatcaatgaaagtaaagtgcagtgttccaaaaaatgtctaggtgattgactactatctttccttgtatccagatgctatagcatcatttagacccagataaagttaaaatatagacagacagacatgaacaccaaaaatctgaatcaaattatgcatttggtagtagtcctatctttgactcaggtttgaatatagctagatgcctgtcacgtttaggtttgtaccaacaaaaaaaaggaaacaatcagtggaaataatggggacaaatttagagatacataatagaatcttatgcttcatttgggattttttgaaaagatttgttaaaagaatgttccaatttaagcccttgatgatgtacttctgaataaccttggctattaacaaaaatataccctgaaattagatgacctggattcctatcacgtgagactgataatggatatgtgctgacactgtcttggtgactgggattaattgggatatggaatatagcactggaaaaaaaaatccagacaaaccaaacacaagaacaaaccaagaccctgctgtcatggtggtcagagtctagtaagggaagaaagatagaaaataaaaaatcctaactatatgccattccaaggggctaggatgaaaaataaagcaaggtaagaagaaagagatagagagtgactggggtgttcttttagataagggatcaggcaaagcagtttgtggacaaggtaaaattttaataataaatttaattcaatttacaattttgaaaaagctggatttttcaaaggtggttgatgtgaaaatattaaggcaatacgtggtggcagaaccatgccatgtttaccttttgttcacctgctgtttcctttgccagaagcatctcctttgttcccatatcccacccaggtatctcctttgcctaggtgattgtggtaactcctgtttatttttcaggtctcaacttgtgtgatcctttgctcagatgggcattctcttcaattccccctaaacaccttgtacttctacttttgtaataggaatcacatttgtaattgtgtgtttattatcggtcttcccacttgattgagttataagagtgctaagatcatgttgctctgttaacctttgcattttctttcttctatccttgtggagcttgcagataagaaaatatgagtttatctcctagttggggaattgaactcactcacatgtatcaacgcatataataatagaatgtttgaagctcaatgctgatcacatattgaggggagtaaacatgggtgtcagtaagttagattttggagtgataagaacatggctttagaacatttctgtttttttgtgattgcattgtgtagctagcaatgtcctgttgttgtttgctgttcttaagaaaggtaccatgtaacaaactctggtaactgaagtcacgaatggctctttttgctagtagtttgcctagttaactggtagctgacaagctagttgtatttttgggggttctttggggaaagtgcttaataagctcagctataaactacagaaaggaggctattgtgaccattggtagacttaaaaaaaggaagtgacgtcattggttcacttgctcttagagacattctggttgctaggtagaaaatgtattgtaaggggcccagagaagaagaagagagactgtttagaaatctatattaatatcccagacaagagaatatggtggcttagagttgtggaaatggaggagagaagcattcatatttaggttgtgtcttggaaatcggatcaagaggatttgttttatggatacagggtgagaaggaaataaagatgtctgctgatttctggtatgagtatccagataaatggtggtgccattcactgagatggcaagccttgatggtggccaattgatagtgagagttttattatgaatagttttaagtttgagatgccaaattacacatacagctctatgttctgggctaagactacaaattactgcatttattatgatgtttggaaataatttttaaaccttttctctctgaattgtgaactccttctcagcatagcatgcttttgtattccctcttgtactccttatttctggagtctctcaattacctggacggatgaacggatggatgatgacagggacttctacactgcttactctttatttctctgtatttcctctccctctccccctattcactttatgtgccacctccctgctttctgaagtttaacagaagcactgtattaatttgttcttttgttgctaatacaggcatacttgagactgggtaattcataaaggaaagaggtttaattgacaatttggcatggctgggaggcatcaggaaacttacgatcgtagcagaaggggaagcaaacatgtccttcacatggtgacagcaaggagaagtgctgagcaaagggggaaaagcctcttataaaaccctcagatctcatgaaaactcattcactatcatcagaacagcatggaggtaaccacccccatgattcagttacctcccaccaggtccttcccatgacacatggggattatgggaactacagttcaagatgagatttgagtggggacacagcaaaaccatatcaagcactaaactgggaattatcacatttgtgtactagctgtgtgacactgggagctctaattaatatttttctgggcctcagcttcttcatctgaaagatgaggcagttggacatgatctctaaatttcctttcagcttgaaaattctgtaattggtatttttttctctgagatgttcaaatcaaatatgtacttttagaccttactttttatattttcaaaggcatgcatttttagaaagagacaatttagagataatcagttcaactcactcgtgtgaaaggcgaggggaatggagccctatgatatgctcctccatttataaagtaaggctaccaatgatagtaacaatagcaatagttacagcaatgatgattgcttctcatcctttggctaagatcaagtgtaataatagtaatgataaaaagaacacctatatcaaaatattcttgtggaactaaaattagataaaacatataaaagtgtctagctaggagtaaatgttcaataaatattgattctcacagtggtttttaatattaaatgtcatgtgacttgcccccaaatatctggctggtgactggcaaagctgggactgaaccatttccttaaggcatacaagccattcatttttcttctaggccccttcttgtcttttcctccaacaatcagagctaaaccatccttcttcatacaatatggagataatacagtgaaatagttatgaacataccttaggggtaggataaaacctgggtttcaaactaaattctgatattctctttctgggacactgggtaagttactgaatgtttctgaatctcagtctcttcatctgtaaaatgaggataaagataatgggtaccaacctcaaagagatgtagtaaggataaaagacattatgtcaagtacttggaacaggtcatggcatgaataaggtcaataaatagtatctatcttaattatcaacttttcccccacgtgctaagtggcagaagttctccacattgtctcctcattgcctagacagaagttattacacgtactcttgaaagaagacttggacattaccactcatggcagaaaaatatatcaattcaaatgttgactggagaaatattgtcagaatcattcagtttggatgttagaaggtgacggtaaagctgaagtcccagacagcaagctgtatggatttgagcagaaggatggagaggcatttaagagggtgggcaggaaagagatgaaattagcagactatccaatgtgttttgaatgtttgaaaaatattactagtggttggtagatgtgtggaaatattttaaaaattcagtgataattcatgtaaatctgagtaaatgaggctagtaaaagaaatgtcatcattggacatcatttggctcaacagcgaacaatattacacagacaaagttatgcaaacactgactacctatgtaaccataaattgcaacttcactctcctgggaagatgggtaggtggaaggggaggagttgatggtggtgctgaagaaaagcaccactatcagctaaattctcatctaaattgacaagaagctaagggataatatctaagcttgataaataaaaaatataagatttatatttagaaacttgcagaaaaacagctaaagaagctgcaagtggctatacttggagaataggacatggggagttagaggtttgttggatagaggccactgtcttttcttgtaagcatttatgaactgtttgacttttaaaacaatgatcactctgatagcagaaatagaaaaaagtgataatacatactatcttttcttttcgtaaataagttatatatgagttatcagtaaaatttacatgaaatttttccttttaaaatgcttatcaagactttcacagtggttgcagaactacaaccctcacatattatgtataaggatgtttataaaataccgtattggatgatagaatttttctcacatttatatacagatattgttaatgctggaaataaagcatgtattgattaaattatcaatgcacatgtattaataatattaccagacacatgtccacaaacaaaaattaaggttataatttttaaaataaatagataccataataatgcatgataatgcttattgttttactatacttttcttacattgagtgcaggaattgagtttttctcatctttgataactcttggaacccaacaaggaatatatgagttacaaatattttcattagtgacttttgttaattatatttcttcttatgaatatgtgcaagacagtaaacctttatattttgttttagataatttactttgttaaaaatatgattttgatagtctcatttagtggttttgttgtatactttttggaaaatatgaaattctattacacgctaattttatagcagatttattagcagatcctacaatcttaaaaacaatatagtagtgattcttatttggggaagatcaatgacaatcacagaatcacctgggaaatttcagaaattaagttactacccaccttggatattcgaaataactctcccaataccatgggagagcagggtgatggttcttatcagaatctgaaagaagtaatccacttgaactgggacttctgctgtcggtaaaagtgaagtaattggggccaaatttacactgaaacaaccaagaattaataaaatgtgtgaaacgacaagtttaaagatgttggacatcagacactgaaagatagtgaatccctgagagtagaaaaataaacaaggtgagccccacagtttcccttacttattgccttgagagggtttccaggccactgtgcagggaaggaaaacccaagtgaagcccaggggacaccctaagtgaggagatgaagctgagtgaatggggaggtcaaggcggttaggattcacatacaaaaaaagagtcctcgaaaggagagagctgcttttaaagagaatttccaaggtctgcagagagtacctttcaattcagtggaataataattaccatgtaaatgtgaagaaattaaccagcctacagaaggaaccagctgaaaatgttaggggtaacagtggctaacactcacacagtgccagcaatagtgctggtttcctccagtcagacttgaaaacctcatgattcatgggctgaaaggttcttgtctcagtggtgaagaataactaacccatgactgagcatgctccagaccttcccaacaaatcataaaaccaaagccagaatgaatcaaactatttctaagtaacaactcttccagaacaaagcttaagtatatttattgaaatccaaaaataatgagcacccatcaaggaagatctacaatgtctggcatttaattgaaaactatcaggcatgtaaagaagcaggaaaacacaaccactaatgaggagaaaaatcaaacaatcaaaagttatccagagatgacatgaatgttagattgagtagatatggaagagatggacttcaaggtagtcattacaactctatcccatatgttcaaaaagtttagatatggaagatacaaaaaagacctaaattaaactctggaaaagatgaataaacttgaagacataacaatagagattatccaaaatgaaacacaagagaaaagaggatatgaaagaggacatcagtgagttgtgggataacttcaagcaacctaatatatatataattaaggtcactgaaggaaagggagggaggattggaaagaaagatatttgaagaaatgatgcttaaaattgttccaattttgataaagttataaatccaagaagtccaatgagccctaatcacaaaaaatatgaagaaatcttcaacaaggcacatcataaacaaatttatcaaaaccagtgataaatataaagagggaagggcattaaaactggttgccacatgggtaaataaagaagaatttttggtataatttaaatctcaaaaattgcttaaaccaaaacaatcacaatgtaatatggagttaaaaacatgagtgagaatcaaatacatggcagtaaaagcacaaatgccagaagggggaaaatggaagtatattaatataaggtttttatactatatataaagtggtataatatcacttgaaggtaaactgtgataagttaaagatgtatagagttaactctaaagcagtaactaaaataacaaaactaacaacagagaggataaaatggagtaacaaaaatatttagttaatccaaaataagtgaaaacagaggaaaagagaaagaacagatagaacatttagaaaactaatagcgagataatgatagatttaaacctaaccatatcatgaattaaaataaatgtaaatagcctaaatattttaatgaaaaggcagatattgtcagattatgtgaaaattaagatctattaataactatatgtggcttgggagaaacactttatcaattataagaaaaaaaagaaaaaatatacaatgttaacattaacaaaacaaagctgggttggctatatttaatataaaagtggatctgtgagcaaaaaaatagtactggatataaagaaggtaatttcataataattaatgggtaaattcattaaatggtcatgtaattataagcatttatgtatctaatttcagagcttcaaaatacatgaagcaaaaattgctagaacttttatagcagtgagagagttaagagattccaacaccactttctcagtaattgatagaacaagtaagcaaaaaaaatcgtaaactatatggaatatttgaacaacacaaccaaaaaattgatctaatctgcaggtatagaaaactctatgcaacaagagcagaatatacagtgttttcaaatctacatagtgtgttatccaatgtggatcatattctaggccatgaaacagtctcagtaaattagaaaagtattcaagtcacaaaaactagtttctctgaccacagcaaaaataaattggaaatcagtaaaatagtccatttaataactaaatgaaattacttatacaacaattcaagtgaaagtctcctttgattttagggacaaaaacctatcaactctcacctcaggaggaaaaattattatgttagattatgcaaaaattaccaatataggaataccattttaggtacaagtttacacaggcaaaataatgtgggtactatgagaaagacttattcaacaaatatacatgtactttggataaatggaaggaattaggagactttgagatctggaaggtataatgcatagcgtaattttattttctctttgcattgcaaatacagcctaaaagtcactgaaaacacttttccttcagacaacatttaaattgaatttacatgcatttgagctatccctccttgacccccatgatgattgtccttttgggggtagatattttgaaattggttctaccatgtatgtgtagctaactcacttcattcattatttctgctcaatacatatactgctactataaaactcttcattgaccttcaattgcatctcatccactcccacctatgtatttttgctcatgttgaaactccacattgaatatattaataccttttccttccattttgctttccaaaccttatccatgcaagctcccatcttacctgctatggacttctcctctattattctgatgtgtcacttatgtttcttctctgaactcctacagaatttcatagataattacgactaaagcaatatcacacagactctcttgttaattaattttgtattcagcaggttttaaactatagtatacattataattacttgggggtgattgtaacaatgcagatttggggccaaatcctcaaaaatcccagaccactaaaactgggggctcaggaatttatattttataaaaaatcccaggagattctgatgtgatgatttgcaaatcacactttggaaaaaacaaatttctttaatggattttaataatttgtctagttcacacgtagatgcacagtatctaatccttcttttatatttttatgtcaacaggtagcatgctaagcatataatggatccttaataaatgcttgtccacctattgacgtagtacagttaaacattttgtgtatgtactcttcagttagctttttaaataaatgattgcataccaggtgttttaatttttaattttttttctaagcttatgattttgcttttcatttgaataatggaattttagagctggaagggatctgtagaattaatttagctcggttctctcttattttttctggaggcaattgagggcaaaagaggttaagtgacttaaccgagttcatacagttaattagaaagagagctacatccgcaatccaactctccaggctcccaagcctagtgttcttgctggggcacatgttgcctcttaccaagaaatttgcccggtagttctagttagtcacacaagtgagaagattcaaacatgcatttgtcaataatttgagtgactaaaaactttatgtcactctttagaaatcacagcaactgttgctttagcttgtttgctgtggataacttagattcaatacttctttgttttgggggctttcttgtacattgtagaaattttagcaggatccctgacctctaatccctcactcattgccaggagcaccctcctaccacgattgtgtcaatcagaaaggtctttagacattgaagaatattctctggcaagcaaaatcacctgcagttgaaaacctctacttacagacaaagacatagatcacagattcttgaaagactcataaagaatgtttacatggaaggatgcttggcatttgaaatgatccctacccgaagacatcataggcatatgccataaacaaaagaatagtgaagttaggagtgcagtgcaatgttataatgtagaccgtactgaggcagatgatggtgtcattttgattttacggcttttgtatttgtatgaatttttattatgcttcttaaaaattttacttatcagttctaaagtgcctgtttctttaagtagagcattatgttatggtataaagagtggttttcatcatttacaaaccaacatatatctattctagacatgaagcatttgttttgcagaattttcaaaagtcaagaaaaattatgtagctataccctttagaaaatgtaaatacatatagtgctttgttatatgcaatgtcttatcttcttttatttactcttttctttgattgcagaagcttagggaagctatttgaccacttagtctagcgtgaccttaacagaatagtttcttaatggatatctactcatctttgctgcagtactgaaggaaacaacttctttctactttcacagaagaggatataaactgaggtttaacagatgagcaacatgttatcaagcagctaccagggaaatgtctcttcagtgctatcaagggtccaaaataaaggaagaggaatattattcagggaaagttttatcccaaagagtagcttgtgaaattgaggcagcatggagggagtagaagattgagtttcagttcaggctttgtcactaggacaatttctactcttgggatcatttttattcatcaattaatgacagtgttgggccagttgatcttgtacatgcctgtgctgcatatctacagtagaaattgtaattatttatgttgctcaaaataaaatatttttaagcaaaaagatgaaaaatagtattagaaaaatgcctcaactgataacataaacaacataaacctaatcaggaaatactgtcctcttgtagagttaaatatgagattttacttcgagggcatatgtacatatatacctcaatacacaatggttctaattaaaataaaacaaaatactaatctgcaaataactttctttttctatgtttgaaacaaaatactgtatttgctcttagcaactctctgctcagttaggtcaattagtggtttaatatttaaaggaaatactcagctttataatattgatgattttcataattaaagaaattataaatatcaactgcttagactccagtgagcttattaacatgcagtagagaatacaaatgttcataactgataccatttttcttaatccatggcaactaagcactgtcagcccttaatacaattacatcaagctctcatacaagttagcttatggccaaatggtctgacacaggcagtcaatatctgggcttaattatgttgataaacaacaaaagtcacttttttgtgtgtaggctaaatgctcacagtgggtagagagaccagctgttgtacttttgatttcaccgtaaagattgtagcaaaaggtcagaactcttttgatgccagctaattaaaatatcaataattatgcaacttataaatttgctcttagtgtgtaaagctgaaacctctttttcatatattttgtggctaggtactttagggtaattattttgatgtgttaagtgtcaaggagattgacatgttaaagaatactcaggcaatcattcctggagttgggttttcttccttcacaaaattgagtacatgaaagtatggtcctcccattcatgacaaagggaaactgagttcgggagagaaagtcacaaatatggaggaaagtatgttccatcagatcattactgaaacgagatggggatattctttactagtggtttttgggcctattattatatgcctgtgagtattccagcgtaattaattgtgttagcttccttaaaaatttgtccctttagatcacactgcaatctatggactctgtcttagagtcactgagtgttcttattaaaatgcatattccctggcctcatggtcagatgttctgtttcagtaggtctggagtagagcttgtgaatatacttcataaatatttgttctgatactcattaaaagttctcaaaccactaacttaggttgcaggaacctaaacactgttaggacaaatattttgcctatttgcttgcttatctttctgctcattcatctcccagtgacccctcttccctgctccatcccctaccataagcttgtctaggtttcagtgaactgtcaattagtatctgctaattggtgcttaacgtattgatgctcatggtggtatttttgtttcaacaacaatagtaataacagcaacaaccacaagaacagtaatatctggtttacatatttgaaaccttgtatctctttgaccctcaaatacttctggtgccacaagttgtagggaattttcatactgtgagatgatactggccttggactttcatgtaatcacttgaaatgggtcagcaaattgggaagtaggagtactcttgaacatcctcctaaactgagatggttagcaataactgaagtctatatggaagtaactgtaaaccatataaatatttcccattaaggtccaactaaatgtaacgattcacaacccaatgcccccttaggtgaatgccaaaaattcctgcacacaatcgctgccacagcacacaaggttattggaagtgtgagggagggggaaattggaggagagaaagatagtggccttaacgtcattgaagtatcttcttttgcaaattttagaaaaacatatagattacgagaatatgtgttgtccttctcttaaagggttccagataagtaaggggccctgaagcttaagcttcactcacttctcagtaagacagttttgcctgtacaccttgctcagtaatagaaacagcacaagatgtatatatgataaataaatgaaagactagaaaacgtgtaattcttttttaaaaattattttagattcaggtggtacaggtggtacaggtacaggtttgtttcatgggtatattgcataccgaaggggattagtcttctagtgtacccattgcccaaatagtgaatattgtatctgttgcccctaggtagtttttaaacccttttccccctgccccactctcctgccttttggagtctccattgtctactatttccatcttatgtccaagtatactcattgtttagtccccacttctaagagggaatatgtggtatttgattttatgtttctgagtgagttcacttagcataatgacctccacctccatccatgttgctacaagggacataattcttttttcatggctgcatagtacttaatggtatatatatgaatttatccagtaaactgttgatgaaaacttaggttggttccatgactttgctatcgcgaatagtgcttcaatgaacatacaagtgctggtgtttttttgatatgatttattttcctttgggtagatacctactagtgggattgctgggtcaaataatagttctatttttagttctttaagaaatctccatactgttttacatagaaattcaactaatttacattcccaccaacagtgtataaacattcccaaaaggtataattcttatcctcccaccttttcagatgaagtgttgaagttgacctgtttgaaatcacttaacttattacaatgggacaagtattaaaaaggatacttcctgttcatggagtttaccatgctcctcaatgagcactactcctagtgtagctcactgtcacttggtttccatgttggacatcgccctggtttcagagaccaatctgcatggcgacatttttttctttaagaaaatttctatctgcatggacccattctttgttaaaaggaatccagaagaatgtgacagccactattaggttatttcttccagatatcaaaactctttgacttagttaacttgtgagttcttaataagcctataaagtagctgtataaatgctgggtaatagagagagatagagggatattcagacttttgggtagtttctctgcgagactgcctaatgtgccactgacgctgtctctgacatgagaaggacttaaatgccagtttactaaagttagtattatacaggggttgatagcctgatttatggagttggcattcctgagttcttaacacagctttgctgcttactatgggacctgtgctcattcacttagtcctatttcgctatcacatattcactatctgttaagcataactgttttgaggattgaatgaattaatatgattagtaagtagtcaataaatactggcacttactgttgctgtgcttggttttgtctttgacactaactagcttcttgacatcagcatcagttttctcatcagtaaaaggagtagttaaatggtagttaagattcataaaattctatgttgaggaatattggattatacatattacactcagaaaaaattattttgaagtaaaagctgttgtagaactcctttgtttaataattgaaagataaagtcccactaattatccagcatcttaaaagataaattaaaaaatccagtaagttggtttctttctttctcttcggaaacaagtttactgaagagccagtcttgttgcctaatgaaccaagaacccagaccctggatttcattactgttatgattccagatcccactagagtctcttatcaaatgtggcctcattaagtgcaacaggtaatgcaattctccattaaattatgctgagttaactcgtgactgacatgagccaaaatgaaatgtaattattttaaatcgttcctattggactgtatttgcacatcacagacagatattaacacatgcaccactacttgtgaatcctcatttatccaggctttattctgagtaagtatactgaatgccaagtctttttaatgaagcttctgtcaataataaaagcgaaatataaaacaactcctgtgttatcctgttttgagtaagttgtttctaagattaattcagtagattgttttcttccccctctatggaagagagaattacttataaacagacccagcccccaatattaatctctgctttttggaattttgtaaagatatttataactttgaaaaaagagagagtacactgccttataataattgctaagattttacaccagaaatgcttataaatgccatatatgtgtaactaattagctaattaacttacttaatctgtttttacagaggaggaaataaatgtacacagagattacacatttacccatttatacattttagctagtggaagagctggattcacaccctggaagcccagtttcagtgcgtgtttgtaaccactaaactaccattgtttctcaaattccctctaaattatactggtttccttaggcagagagacacactaagcactgaacagtgaggattgaacccacagaatgcaagtttgtatctggtgatatatatgtcttattttgtttctcagttagaaagaatacaatatatcaaatgcaacccaatttttaaataggagaaaccaccaataggtagttataaaacttgcctgcggtgatctggagactttagtgaaaagcaggaatagtacaagcttgtgactctcactctgtccttggctaaagccactagagaatgtgtctgcctagtgacagccatcagtggctgtaggggatagagatgacttggacacaattagtgattccagagggaagtgacagaacatgaaacgcctgggggcaaaaggggggtgttgctgggatccagcttatggtaataacttcaccaacaacctcaactcaaaacaaaatggataatatattttaaagggcattccaaaaggatcttactattcaacccttgggttccactgttatagagtgagcctgcactttcattcctgaagtctttttttcagaggcaaagacacatgggcaatcctataaagtcttcccatgacttattggaagcatagtgcttctgtttttcattgacttttaaaaatagtattactttatatcagaaataataactcttgaatagacatattatatgcaaaataacccataataccaactcagagaggaaatgggaattattttagtcccaccattcagaaactatcagttaacatttttctatatttacagctatagttatatctataacaacttttgaaccacatgcatctgcaattttggatcttgtatttcacttaaggtgaatagttctccaggttgttacatatttttaaattttaaatttgaaataccatttaatgggtggataataaccaactgcacattgtaccataatttattctacatgctcctgttgagcaattagattgtatacagatgttttcaattttgaacaacacatatttttatacttgagtcctggaattttaaaaattatttttaggatagtctttcttaggataggcatttgtcttcaaagaatgtacagttttaaataaaacttctaatatgtattagaaaattgtcttactgaaatatcttagttttttaaaaattctatcagctgtgcaaaaggatgtctgtctcatgagatcctcaaaaaattaaagattatcattaaaaatatttggttaatttagtaggtcaactattataccctattcaatttctatttttaaactatttgtcatctgtgtttcctcttttacaaatgaattgtctactcatatcctttgtctaagatctaatacattaaagaagtgtttgctactgtatgttgtgatcaaaatgatgaattctgagcaaacttggttaaagcaaaacatgctaaattccaacttcacaaggagtttaaaagttttcctttactaaataaaattcagccagacttttaaaaatgagatatgtggaaagatttaggtgaaacaaataccatatttataatatcttataaaatggtgatgaattatatataacgcagaattatcctttacgattttggaacaaggtaaaatactgtgtttaaataaaataagaattatcctttacagttatcttttacaattttgaggaaattatcctttacaattttggaagaagggaaatgcattcttttttaaacagaaaaacattcttttaaaataagatttaggaatatgtttcattcctaagtcttatttactactgtaactgctcattgtttctgaattcctacagtgcattataacgactttgaagagcaaacaaatgagcaagaaaacagtgttgtacaaatattgtcaaatattttttctccatgtccaaccattttaggttaaacagtctaatagctttcttcaccttgttcaccaagtcagcttccaatttgttcaagtagatctatagctttaaagatgtgcatattttttgaacgttttttcccttaaatcctctgatgtctcttttttcttaaacaaaagacacagtttgcttagctgcaaaatttgtctgtacttttcagaaattaatgtgaatcttcccaagtctaagaacaataattctattttggcttaactccaattgtctgcagaaaaaaaaccaaaaaaaaaaaaaaaaaaaaaaaaaaaaccaccaaaaccacacaaaccgttaaggagagtaatgtaatttgtagaaatctgcaggaggccttggtccttggtccaggagtactactgctgacaattacacaaataatgttcctatgcaattatcccagcaataaccgatagcaagcaaaaattatagaggcctgatgggatttatactcagaggtttctatgtagcactttgtttgaatgaaaatggctgtcttaatttttttttcttttctttaaagaaaataatcagtcagcttcttaggagaacataattttcttccatctaggtttaaatggcattagcacagcaatcagatgtcaaggtgaaagaaacatgtctgccccgggtacataaatggcaaaaataccaggtaatatgggtaccatttccctggcttttgcattttaaattgcattaaccttgtgctgtgtagagttatgatttcttgaactgttttcactctaaaatgggcaatcagttctacaatttaaaaatgtgctatgtgctgtcaagtttttctcttggatgcgaaggcacagaaaaatactcagtttgttttggttttcatgtttgcatgattactgcactgtatttatttccacaattccttcaatgtcaccattcgactacccttaattaaaatctgcttgtatttgctctttgcctaggagattacatctcaggacattatgtaatacatttcaagcaaatcagattggaagaaattattttttccttttttaaaagatgcaggtattaatggtcacgtatgaagtgtattgaaaagtagtaaagatctatcgtttaggaagtcagacagccatttttacaaaaactaaatacaaccacaaaatctaagaaggaagaaagagagcacatatgtaccaaattcccttccagtgatcccttttataaaacttgactagaggcaaagagagaatgaaaagcagtttttagtgaagctgtctttggaaattgtgcagattctctttggctgaaaaagaaaaaaagcagagctggacaaacaaatttatttctctatccttaatggattaaatggaaaatgaattccagtgggcaaaccagttttgtcttcattggggtttaaaaatttatattccaaaggaaatttggtagcttttaatgaaagttccaatttttttttctgaggaaggtggtgggcatttttttttttttttgcttattatgtgtattagaaaacatgaaacaatctaataattttctatatttaaaatgatggagcagaaattggctggtacataatcattagtaaataaatgcttgttggattaaatattacttgacatagtcttgacttgaagcctaggccagttttatgactgactgactaatgaggaagatacccaggttttagccttaattcagaatgggtcttaaaggaatggagggactgtccagcaaactttctcagggtaatagtttagaatatatgtggcagtaaatctctagtttcatctatccacccaatactgtcttttccttacatcttccagctaacttatctccacagatttaatgcatcaccaagtcccatcaggctaagatgttcaaacacccttggtttgaaaaaatcatcttgagccatgatcagtgtagtcatttgttctgttggataaaaataaaacaaactacaggtttccccaagttgagatctattactaattccaaatcatcacataattctctaatgagtgttgagatttcctgtggcattggaaaaatttttcaattatatttatttccaagaacatttcttaggaaaataatcctttgatttaactgtggaatttagtattgaatctctagaaagctgaaatggttatgtcagtggctgaagtgtggttttaatctactgtgctgtaagaggtacacaaactgattacaggtggagttatgcttgttaagagctaagtaagatcttggtctcaacaagatgtgggactcagggagcttataacatgatggaagaaaaaagcaaaaaaaataagactatgccaatgttagatactatcattgcttaggtgttaaccttcaggcatttaggatgacaccgaagttgtctaaaatacaataatagccaggggcaatccttcagtctaatgagacagatgtgatccaaacctggggatgatgcacttgtcagaggaggagcaataccgaccatatggtgggagattgactcacatccatcagaatgagccggtcggtgctcttaggatttgaaactgagaatgttgtgcttatggggatgtacatgtttttgggtgtatgtgagtgggtaaatgagctgcagtcctctgtaccctgaattgtggtccataaagacatttataataggctcttagtacattaatatgtgttatctatgttccacatacttccacatcctttcttaggttcacatttcaggaaaagcaaaagagtatttgggtagaaaagaggctctagagatacctgtcttaaaacctgtgttaaaaaacagaacatggctgatctatttcctgaattctttggccttttaagtataaagtccttctgttctttaggaaggctctttgcttgaaataatacagcccgttcaccagaacagttacgtttgtaacagtatgtgaaacaagactttaaggatttaaaaaatgaaagaaacaatcaagaccttaacttttctaattccagtttaaattttttcttgatcctattagaattttaggagggatatcaaattgatggaaattgccatgacgtcttgaatcacaggggtgttaaatcccttttggatcaagacacacatagatgtcatcttctgccagagcttgatagtagggaagggcagtccttggaaggcagtgtggtttggcttcgtttctgaaaaagtgtaggtcctcaataaaaggcattgaatgaaaggactgaatgcaacccagatatgctggtgtcaagagcctgtggttctaatggtcaggagtgaatacagttcactggttggggaaaactaacacgcaactgatagactgaagtccagtgggagttattttctgctcagcactccattggaggctgcatttgtgaatcaactaagagcagcttttattgatatggtcactttgcttttagttcccattttgaagtgtgtctctttgatggatgtgtaaggaatctgcttagacacctctgacagaagacaccaggcagaagatacgagtagattttgaacaatcctgattccacaaaagagatgacacagactgctgagtaaaacacagcaagccagtttgtaaagagaccaagcattacatgacagaagcacctaagtcacttttcaggttgcttgtctttgagggctggagaggaggcttctttctgaaaggagaaaagaaaaactttcccaaggccaaagcacaccaggttgtaaaagcttggagtagagctttgctgacctcttgtccaatctccccaacctcatttctttgttcgtcttggcaaggaccctctgctagaatttaggcagtttccttcacagatcttggctataacttgttcattaccagttttgaacctttgcgtttgttatttctcacttactgaatgtattctctgcctgattcctgtgtgtctactttatattttttatcttaaaaaatctggcttacatctaactcttggggaagcatttcatatctaagcttctcctgtctatgtcctatgtccccactgggctttctatctgtacttggaacaaatggatctagtttagacagtataatttgcactggggttaaatatttgttaactatagatagtcattctctctaactataatataggctcttgaggggaggaacatatttttactcatgcagttgtattcgtccttcttccctccatccaggataggccagtgattggcaaacagcaggcacttagcccatgttatggctattgatccaaaaataagtatctttataatgggccccaactcagagaaggtgagcatcaggaaaatggaaaagagtgattacatagagtgtgtgttctgggtgtctactgctgcctaacaaactatccccaaatttggtgacttgacacaacagtcatctgccatttagcagggtttggaagtaattgctcaactctgctgtgtgtgatgttagctggattttctctctactgagtctggagcatctacctccaagattgctcactcacctggctgtcaagttggttccggttgtctactgggagttcagctgcaagtgttggctgggggctttgatttctcttcatgtgggcccctccaccaggttacttgtgctttcttacagagtgatcaatgagttccgagaatgctccagcaggcagaaagtaaaaactaactggccagttaagaactatgtatgtctagaactgacacaacattacatcatcagaaacaaaccctacctctttttgggggagtaacatgatagtattgcagaaaaccacacttgttttaaacataggtatttggaaaatacagactgctatatattgtgttactgataaaactactacacaaagtcacattacataaagcatggaaaccccttggtagtgaactcttttcaaaccaaagatgatagttaacatttatttaatgcttactctgtgtcaggcatgggctaaagggcttatacatgatttctcatttgattctcacaacttatgggtcagacatttattcctgtccccattccagatgaagaaacagatacgatgaggtaatgtaccttgctcaaggtcataaccattaagaggcaaaggcaggatatgaattgaagtcgtctaaattcataacacatacgcttaactctcctgtttcctagtcgatgactacatagaatgagacattgtaatgtagcacagagatatgagaaataccagtggtcacttgtccagaggtttagaacctgtgtttgggtccatacatgtgcttatgggacagttgaaacctctgtgattgtgttacagcattgttcatgtgggtacatcccgggcttttgttagtcttaaaagggcatgcattgtaaatgcttaagtgttaaaacaacaacaacaacaacaacaacaacaatgtgattagacccctcttcctaaggcaggctcaatctcaaatatctcataacaatgtcaatcaacaccttcctttaaaacattcagaaggaggcttccatggtatactggggtcatgcttgctttgggtcctgtgacagacttggtcaaaaccctagctactcctttgcaatccttttaatcttgggtaaattattgacccctccactcagggtctggtttcttggtttgtagactagagctaatgtcaaccgcctttaagggttttgatgacagaataatttactgtgtgtaatgtacccagcagtaatggggttttacccattgttatttcctttaatggtattttgagtattgtacagaactggtgcagtaaaaacatttccttctcaagtagctgctaccttctaaaggcaggacaaacctccagtgaaattcatctctcacatcactcatatacagcgacataaactgctcagctcacttttcaggattcagtagaatgctggacccatattttcctccttgtgctaaaacattctgcagatttagtaccatgtaaaggcatacagaaaatcaatccaggcaattgcttctttactttctgatcagttcctcccagtttatccccagctttgaatgtacttcatctcttctatgtagaccattatcctctctgcccgcacagtcctatcataaaaaaaaggttcaaagcacttcacacacataaaaaggcttgttattaaaatttctcttctgtcctccctaatttgatattttctgaataaaatcagagagagatttctatgaaatttatgtatgagaaacattttgattttaaattcttacaattaggttttatatgggtttctttattatctatcagctttcaagagtcaaaattgtatctgtttatttggttatttttttcggtgacacattttatctattttattttattttttggcaaacattaacaagtctttttgggaggtgggaactcctgtgcataatggaagcgagttgtaattcttccagagtgtttttctcaggtgccactggacatcctgttagacttgaagagttagagcagctggagcttgggagagaatattagtaaatggttaacagtaaaatcggcttttaattttatctttttaatgtctaggagacattggagccaataaagcttagttactacataaaatgatatctattaacaatgcttccagtgtggtctctttctttgttcttagagccttttcttacaagtaggtttagttctttaaacctttgaatgtggctccatactgagctagattcttatatctcataggctcaagtcacctatgagcccaaccttttccttttatatgattgttactgatatttaataagtttcatttctccttgttatttttaaattaagtttcatcagcctacagcagatttcgaggtattttctagttagaatcgattgtttaaactgcccacctttcttgcttgcttttcattttgtttcatagatgactgccgtcttttgtgttgattatcttgctatagtttgtttgtttgttttgatctgtttttggaagtatagtgaactgcaggaaaaaattaaaaacaatagaatattgattacatcctaatattgggatctttttattttattttattttgagacagagtcttgctctgttgcccaggctggagtgtggtggcatgatcatagcttactataaccttcaactcctgggctaaagtgacttccacctcagcctgctgagtagctgggactataggtaccatgcatggctgatttttaaaaattttttagagacaaggtcccattatgttgcccaggctggtcttgaacttctggtctcaagtgattctcctacctcagccttccaaagtgttaagattataggcatgagccgccacgccctggtggaatctaattttagaacattaatatgaacatacaaaaaagtcttaatttgattgaaaaagaaaagtcctttctttcttctgtcacctcccgagtgtcttagaagatctgtatttacaatttcccttaaattggtaagacatgcttttgccttaggtgttttcattaaaattcataaacaccagacaaactcattatttggatgcccaaatttaataaaaatataaattcttttggttcctattttctccctactttcttaagacacagtaattaatttatgctgagaacactcatttttgtcttagctgagttccctaaaactttcagcgctaagttaacaggtacatgagcttttttcctcagttagatgccactagtccattcagtgttgatagaaggctggggttgggtctggtgccttagcagggccaagtgtagaccttataggtttaggtccgtaaacttcaccttatatttttccttccagataatgctacatagacatggatttcagtcatagaaactcaaatgtgtcacttaatacagaatgagtcttcatgatgtcaccaatttggagtgggcatagcatactgggccagtagtcaacttgcctgccaaatctgatccatttgtagtggttgtttttctgaaattacaactaggctgacatgaaagattgccagaatcgattattgatatctaccatgaagtcgggagagaagaatggtaacggtagagccatgcatttgccgtctttaggcattatttatgaagaaaacaaagaaggactccttttcattttactttgatgcctcagttacaaaacagaattctacttgaaagattaatataactcattgctgcacatcttgaataatccacttaatttcaatattcgtaggatagtcaggtcatataaaaaataatagcatatgtaaaagtctagtattatcaaaaaattataagctgtgaagtttgacttctcaaacccaaccttctcatactataatgcagatgtgctttgctttactccttggcattagatatttcaaagactgttgacatttgaaaaccagagtagctgaacatggattttctaaagaacacactctaattctagaaaaaaggcagtgtgatctttattattttgtttgatgtgacagactgcaagggagtatactctgtggtcatagggatactctcatttcagaagcagccacttacttgaatccacattattactgttacgccctccaatggtaggttgttggcaagtatttattaccctttctgcagtgtgtaagttaaatttcttttccaaggcaatggggccctaagggaaaatcaaggaagggggagagtgagaggagcctgggatgagacgtctggttctataacttccttccaagccattagttgatctcttggatcagcttttctcaaccttttgtgtgtaactttcctggcagagttgttgaattatgtgcagccactttcagcaagctgcttaggtcagggggcttttctttggcatttagctcccacatacttaaacaaaacctcaatttgctaaggtttttaacactagaagcttgttctccttatctggttgtattatttcttccacacattgttattcataacacatctggctgcaggttacagcattttggctgagcttcaccatgctaacctttgttacctctcctagggtttaggaaacaagcccctctggattgaaatattaatgatcataagtacaacagcaacccctctgcttttcaagtaatgcaattctaagccgaagggcagcagcaccaattataactacgggaattctatatactctcccagtaggatagacagatgcacatacagggactcagctgggctctgatacttgtaactcaatgcttccttgtgctttggtgtttcgaagctctgaaagagaaaaatgattctagcaaggagatttggttggtgagggagaaccgctcacaactgctgagctagctgtatagcaaattgcccttaggtagggtctccttacttcttgtaacactcagttttggagatgagggaagcctatgtgacacacacacacacacacacacacacacacacctctctctctctttttctctttctttttccctccctccttccctcctctgggctgttttcagtaattagaatagtgtaccaaagaatgtagtagtacattttattttcaactcaactgccacctgagagacgccctgagacattcagcccaagggtgaaaacaaatgagccaagattataaaatgggtcgagtcacatggtatagggagcctgttggcagaaacagattcacagactgaatcttttgaggctgacttttctgctagactagtccctaactccaggctgacagtcaaaagccttagatgattagagggcataatgaggttttgtaaaggtccatgagttctcaacaggaagaaaagagaaaaaaagtgtagagcaccaggcagggaaaaatttaggtatttacataaaaagagagtggtgccaaaagaataaaactgcagaaagtcggcaaacaatggggaaaatgttgctgagaaacaaaagaacaaagcagtatgtgattttttaaaaaaagtattgtatatatttaacaacatgatgtttcgatatacatatacatagtgaaacggttactacggtcaaacaatattaagcatccaaatgagagttacagataatggcactcatcatttattgaatatctatactgttccaggcaccattttaagtgcttggcatgctattgacttatgatccttgtaatgaccctgtgaggaagggaatattttattaccattttacagataggaaactggaggcacaaaaaccttaaattttaatttgctcaagatcaaccttacatttttaaccattatacgtcagcttcctcccaagagattgaagaggctttttaagaagaggttggaacagttggaaaggccagatggaaaatattgatcctcaaaaaatctgtaggattgagctaggcaggggagctgatgtctattccaggcagatgaataatattaacaaaagtacttcagcaaaagagataccttacaaaagagagctttgtaaatgcatgatttttaatggttgattcatttccttgaagcaactgattaacttactttccttttcctctataactctgaattcagccctggtgataatgaaatgagttttttttttttgttcttttcttttctttaaaccgtaactttcttaaatgtgatttttacagatattctttaatgactaacacattcctgtgcttgagtgatgttaaatggaaactttaaaataaatctaaaaataaatacagttgatggatatcctaatagataatatcctaatggatattgtcttaacatatcctaatggataatgtttaatataaatgggaatgctcatggtataaaaaatatgtctggtataagctagtgttgtttaaaaatgtgtattggtatgtgcatatatttcaaaaagattgaaaaaacatatctctagttatctctgagtggtgagaatatcaatgacatatactttttctgaatttcctaatttaaaaaatgacatgtattatctctataagcagaaaagatgccatcaaaagtaaaaataaatatggctctaacatcatgttttagaaatggctccagtagataattaagttatgaattctaacctataagcatatacatacttagttctactttttatttgaattaaatcttttgactttatatgcaagatagaacattgacttccaaatctgtaacagaattagtcaaacctcaggaggtcaaaatgaaaccaattctctatcacacattgcaaagaaaactgccagttcctgttctaaactttgggtccttgaattctttatctgatttctagtgtacagcactacttaattaggagaagaaaaacattgttgtgtattttaaaaaagaagaaactgtgtcttaaggcaaaaatcagcctaattttctgtaggttatattcagtcattgtgtctgaattcttagagctctttgagaatgcccactaactaagaatttggatatatgtgctcctagttagagcctagaatgagcaacaaaattggtgtattccattacagaaatataaacttatgaaagcataatatgttgatgttaccatttttattgatgacataggaaaggaggatgcagaagggattgaaacaagactcggaagcactttctgactatgagcaataaggtgtgaaaaaatgtggagagctagtatgagagctggtaaagggaaaggattttaggagaagtcaaatttccttggggtgattctggttgggggaaaaggttacccatttggaaattcctccttctctatagattgagacaaatatccccagcaaatgctttatctttttacctggagtccaaggcagccactgtgctctgctaataatgcacgcagaaattctttgggaatgccacttattgtggttaactggcttgcccaaaccataaaccctggagggagcttagttaaaaattgatgggccattgagattaaaagagcaaaacaaacagccacaaaacaaataaataagtgatgcttcttcagttagccaatgccagaactcttcactgccagttggaatttgaatagggtagaatatatgcaaagaacaggcaaaatgcctctctcagttccattgcataaaactaagaaacttcccacctccaatccttcctcttgtccccagagcacaaaaattatagatttagcccatgctttttgactatctgctcactccttgggcagaaacatcaatcaccttgccatccgcttactctgatggggctgcatagtttttctttttcattgtctgtttgccatcctagcctcctatagcaaaacagattcaagccaattgcaaaattaattttaaaaataaatgtcttaaaccagcgtagcagtaaattaatttcatgcctaatctaaatagttctgttaataaaagtagaatgcgtatggtacttgagaatgactgtacaggggatgattttgctggctttctcctctggatgtgacattgctcatggctcttcccaactgctgccagaagctgtgttgattgtaggttgtgggtgcttaacagccatctggaaggaaagttggcaacacctagttgaaagcatatctcaaactgagggatcctggctgccatctcggttagtaaacactgtagcttccccactggattgaacacttactccaaattcctaatgggaagagaaaatcaagaaggagggaaaagaataagcatcacttgaatgctttacaaactggccattcattaaggcaggatgcttttcttttattccagaactcaatccaggtgaagtgtggtccatttctttcttaatctcattagatagagctagtcaattactgctcaagtttaaaaagaatatgcactctgtgctttttagaaaccagagtttgtaacagtctttgctggaaataagcaaagaagcaggagacataggatgattttgctgtatgtttattcaacactacaatgccagttctggaattattctattgaatctttttctcttatttgctggactgtgtcctctcaggaagtaaacaagtagacttcaagagtcccttaaattttggattagaggtagcagtagtaataaaatagggagcttttgttgagaactctttcctgcccaatcacctgtggcatataagacggcaccacaaatcagatgtggccctgtgtattctttctcatattttctttctcgtagttttcagggtcattctcagaaacctggagagtgatgatggatagattccagcccactgtcactctgggtgggtcctttcaaaacatcaaaatgtgattttgctgtcatttgagtgtcaatttcttttctctcaagagtatttaccaagaacatcactggaaagagtttgtcttatacccatattttaagcacgcaatgcaggatcttagtatttttaaagccaaataaagcaaggaagacataagtcaatagagaaattgaaacatagaatctagatttgttgcttaaatctgattcaagagcttatgcaatccttagaatgggactatttctatagaatcacagtgagtttgacataaatataaaggagagagggtttaggtataacaaaccttgttgtgttctaaactagaacatttttatccaaactagatgttagtttacttttatactagagaaaaaacatgaaactatgtagcaacaaaatattgaaatattttgacttacgccacatctttttaaactttataattttatttttttgggtgtttcactggtgtgtttaggtgccctcacaacatattttgtggaataaacttatactacctcttggcccatcgttacttttaatgagagttttgtgaagcacaactttacagtgggtttggctttctatttctatgattcctggtgaattttagggccacaaattcaataacaaagttgttaaagtattcatttagtttagtattctcccacaaacctcactgtagcctaactctcttccttgagttaagaatggaggatcctttgtgtgtcttaaagtgctgacagtttcccttggaaattctgttggtttggggcaccctggttactccaaagtaggtgggatgatgccagatgaggactttactgtcaagagaatccagttgttattgcttccttcttatccactttgcttaccaagtaagcacagcattgtgttttctgagtctctcacagaggctcgagcaaaggagcttcagtctctctagttctttggcaccatcgattctgatgactcagatacttgtccagatggaatcattggaatcttctctacataatgacactgtggtgctctcttttggaggaccatgaaattgttccaaaattaaacctgttgtttagctttggttgcatggacagagactatgatgattaattttaaatgtccacttgactgaattaatgaatacctaggaaagtggtaaagcattattttggggctttcctatgaggatgtttccagaggagattggcatgtgagtttgagtggactaagtagtgaggatctaccttaaagttgggtaggtagcatctaatgtgttggagccttggatgaataaaaacagaagaaaggcaaattggtctctgtctctcctggagctgggacactcttctcctgccctcagacactaggaccccaggtcctccatccttgcaattcttggacttacaccagtggccctcatgagttcgaaggcctttggctttgaattaagaattatactattggctcctctgatttagaggtgtttggacttggactgagccatgctaccagtatcacagagtctccagcttacaggtggcctgggtcttgggacttagcctccctcatcatctgagccaattcccctaataacctcatattcattcatattttttttctctctctctcatctatctatctactgttagttctgtccctctggagaacactaatacagaaatcatcatttactcaaattgtttcaagaacaagaagaaaaaaagaatacttaaagattcatgtggcctaaaattttagtgaaacattcaggcttctctcttgaccgtctgctttatctctcacacatacacatctgtgatggaagctttgcttttctacgaatcttcattatacacttcctactaactggtttggctctggtcccttatactgttagtttgcttcaaatcttatgtttccaactctaaatatgattttatctcccccaaataacagtttaagttcttttgggttttctagaaaccatttcttgagaagccctgtttcattttattttaaataacaggtcctttcaaagatcacttgctaagtatgaattatttgcctttggttcatgtttgcgcctctggtcaaatcatttctgcaggggtcttatagtaaatactgcacctaagaactatgagcattacatttctttgtggaaaaggctgtgggcagggcccacaatgactaaccacctgtgtatctgatatgcaatccttagaatgggacaatttctatagaatcacaatgagtcagacatacaccttgtttcattctaaactagaacatttttatccagtaactaaagtagatgttagtttgcttttaaactaaagaaaaaacatgaaactataaagcaacaaaatattgaaatatttagacttatgccacatcttttcaaactttataattttatctttttgagtattcaatgccaccagactgaagcctgcatatttctctgaggtgctctctgaggttagtttcctgctagtgtggctatgtggagtgtgatgttcttataatcgacctaaatatagtttagttaaaggagaacatatggtctttcagtgttgctcaaggcatgatttcactggactaatttcaatcaggtactttgttttcagtgcggcacttaacagaatcataggcagtctgagctaggagtggccttacatcgtctactccaaatcaagtccaacccctttatatttatagaaaataatttggccgaatacaggtaatctgtgtgggtgaaaataagcttgctgaattgcagggcgagtcttttttcaacgtcccatgctattttcgggatagatataacatatagctttaaaattgatattcatcctaagtccttcaaatacaggtaaataaaatagagcagattatgtgacactaactgtaaatgtcctgagaatggtagaaacctctgttgactataactggttctaaaccaagatggtggaattttattttctcaaatgttttcagcatttaaaatttcccttgtatgtctctcttaaggtcccaatttcctcgaataaataggcaaacaagaactaataatgtattttctttagctacattctccctcctgatgctatgatttttaaaaatctcatgctttctgcaaatattttaaatgataaatttttacacaaggccccaaaatagcagcttatgtgcagatgcataaagagaaggctgtattttgtatgtaaactatgttaatgcaatgaggagaccattttttgtttcttttcacagcattatgacctcctaactgtggttctgttattttgtatgtgtgcaaatctccaaacttgatgctttgatcaagcaatatgtcatcaaatatcccttacataatgcataaaagaaagttttcattcttagcaaaaaaaaaaaaaaaaattctcatttcaacagaataaatatttattgaatcagtgccaaaatgttcagtgaagaactgagtaccctgctggtacttgaggtctatgtcaactacagtttgatggagggctttttctttggtccttaaatgggtagtattttctaaagctagagacttttatctgcctccaagtcagtactgagtgcagtgtttgatatctttgcatttgtaacctgacccatttactgagcaatgcaacagggatttgatcatggataagaattccaagttaacaaatgcaaggggattatggaattagaaaaaaattataattttaaaagcctttaaaatattgacccttgacaatataagtctatgaatttaaaactgttttgatgaaattcgaacacagagtaattaatgcatcaggttgccaattctgatgcatcacatcaatctactaatttgggattaccagacattatgtgcattctaatcaataactctggacatggagagcatcacctatgaaagttttgcaaaaataattgaacctaaatctaattaagcttctacacctagctaccagttctacataaatgtcatgagaaaattagaaaagggggaggagccattgtactttaaaagaaacaatatacataacaacccattgaaagggatatacgttgttaggatttaaattcaaatatgactataaaagaatatttttgagataatcaaggaaaaatagacaagtattagatttcatttagaggtattaattttgttaagtgtgataatcttataactattttaagatatctgttagcaatacatactgataaacttatgagtaaaatgatataatatttgggacttactttaaagctgttcagtaataaaagaaaatgtgggagggcaggagcagtcatgaatggcaagttgtaattaatttttgaagctggatgatgggtctatgggagattattacactcatctctatttttgtgtgtgtttcagagttttcaaagtaagaaaattacaaaacaagctaacagaggtttgtcttcttcctagagtgggcaagatctttagaaccacaactcaggtttgacttggtaagaaaaaatgatattctgtaggttcccacactactcaacactgaaggctgacaacttatttattaggagagggatacctacggtattactttggtctattactggttgtgtgtctatgggcattcacctctgtcagccattagagttatcatttgtgatgtgaaaataatagtacccatagtatatgattgtaatgaggtttaaatatgacaatgtatgtaaaatagttggtacaatgcccagcattcattcactcctcaataaagtggagctgttactgtctttacctcacttaacaaagatcaattgagtgccagttatgtgccagaacctgtgcaatatccacaggattttatgacaaaaaagatacacttctccccatgaatggttcttaatttatttaaaaaattgactcagaagagattgatgttttgttgatataaaactgttaaatatcagcagtttcatgcagttcaacttggtaactaaagtgagatatgataatggaggcagcatagttaagatgatagattctagcactagaccttttggacttgaaacctggctctggcatgaataagctgcgtgatcctgggcaaagtcatctttttgtgcgttagtgtcattgtgaagtgagggatagaatagtacttaccttataggattgttatgaagacggcacataacatacacagcacagtaattagtaaataatgagccttgtatactatagtaatcagcatatgtagaaagtgatgtgcgaaggcacccaattgtgggaagtgcagataatcatattgggtgttgggggtttttactgaggggatcatagaagttttcacagagaaagtatgacatttgagattcaacaggaagaaggagttatgcaggcaaagattactctaagtacaacttagacaaaggacctggaatgtacaaaggtctggaagtgggagggaagagtttcaggagcagagagaagtggagtagggttagagtttaaaatgtgggtctttggaatggaaaggaacagggcatgatacagtcatggtagattgggtggtttatattttgataatttggtaggcaaaagagtcataaggagatcttaaccaagagaacaatagcagtattgtgatgaattgcaattgagggaagacttcttgggagtttataaaaataacctactcagaaggtggtttctgttatcaacagaatcagtatatatatgtctgtctatctgtctgtctatctaatctaatctaatctaatctaatctaatctaatctaatctaatctaatctaatctaactctggttagaaatgggaattcctggtcccacttagaattatgtggtcccacctcacccagaatctttaacaagatctccaggtgagctatagcatgttgaaatttgaaaaacactggcttgacaatgtcataggagagtctgggctaagacaggaatagtgggatgtaaaggagggtgtgaggaccactcccagatatatttaagaagtggaactgaaaagatttgactgatatggtatggggatagtgggtagtaaagaggatgcccatcgagaatatgtctgtgattacttattagggtttctttgtggatggcaatgggaaacacaggaaaaggggaaatttggggggaacagaggtgggaaaaagaactcattttattgcatattaagcagcctgtaggacatggaagatccataagaaatggattgaggaaaaaggagtcactttataatgaggaaaatcttaagaaagcggttatcttaatgtcaaggaagagtcccaaaaggacaaatgctagacatatccctctctactgttcttctacaacagaacaaggacaaattagaattggttctctagtaagcattaactactctgaaaaattttgagcttgtaaagtcaaagatctctggttcctctgtcaagtataaatgcataaaaataaaaccgtaagacacaacaaagcttggtaatttgtacgtaattctcctccatagacttggcaggaattcaagctctggaattggagaggttaaggagtcctagtgattccttggcatcattgttggtggacttgttaaaaaaaaaaaaaaacacttggtttggaaggatgtgaataatttagatatctgaattcactatctgctgagttgaaatgaaatgctaccaaggggtaggcttgaaaggttatttagccagattgtggaatctctaaatatgcaatcactccccaactcagagttgccacatttagcaaaaaacaggacacccagttaaatctgaatcttagatgaacacaaataattttttagtatgtcttaaataatgcatggaatatacatatattttaaaaagaatcattatctgaaattcaaaattaagtagatgtcatatattttatctggatacttcctccaatgccctaattatattaaataattgcaatatatatattgcagatataatgaaaatagcaaataatgtttaagggctaagctgagaattttgtaaaacattatgtagaaatttaaagcagtgattaatacaaacatgtatatattcaatttggagaaaaagaaacagaacaagcttgctggaaaaattatgccatgatttttcttcctgtgcttatgataaaattactgacttattttttaaaccctgcatacgttttagcacctcattctataatcataatacagcatttagtggcaagacagtctattattaaggtgtaaggtatcaaacaaacagtagacatagagctgtgaaggtaaagcctgatgcttatttttttaaagcagactctgatattaagcagatgtgcttgtagtgaacaaggcaatgttgaaaaatcaaactctattgcaggtagcatctaatacataatggaaacctccttttcggttggatctgttttttaaaattttaagacttgggtatatattagttttttttcaattaaattcaacaaatatatcaaacagaatatgcaattaaaaatagttggaagtaagaaatattatgaggccacagagaaataaggaattacttccatcaagggtcatttgagaaggtcttacagagggcagcatgagagcatcttcttaaaatacaggatttgaaaaaacctcagtatgttattttttttctgattaaaagtaatacatgcaggaattttgtagaggggagtttaaaaaagcagcagaaaacaattaccctgaatctcaagacctagaaatactgatattgttttgatatatttccatccagtctttctctgagtttttttttttttacccagttaagatcatactgtgtacatgcaattttctgtcctgctatttcacttaacaaatgtcttaaacatttctccttgtcattaaaaactctctgttcacatcatttaaaccaatcatacattatattggtgagtagtgattttcaatataattgtctaactttgggtttttatgtactgataaggtttttaagcaactgttttacatttaaataaatttatatctctatttctgagtcttagaagtaaattttgggaattaagggtataaaacgacatgaatggtcttgacatacatactaccgaactactttataaatagattatcccaatttagacttgaagagtcaacagatagagacaggaaacaaaagagcactatagggcataggtggggaagtgtagtatgtatttggcaacaaggaacagttggaatattttggagcataatgcatgagtgatggataggtacaaacagcctgaaaaggcactttagaaccaggttatggaagctcttaaatgccaaactaatgcaatgagctttctttttgcagggagttgtgagccatggaaggcttctgagtaggagaatgccatgactttagaactttcttccagttaattataggttattaaatgtctctgaacttttggatcatgaccaaataatatttaaggtcatcagctatcaaaatttgaatgtctggaaataaactatgccattggctcctgatgtttaaagacatcattgacatttaccttattgaacataaattgatttttacacacttctgtcagtgactacataaagctcctggaaggtaaaaagtgctaggtcaattctatgtcatggaaacctttaaaggtgtactctggtggtatacagaactgtgagtgtcataaagatttattgaggatttaagatgttcttaggaccttctagcttaatgatgtgccctgtaagtgttcaggctctgagcaggaccagaagagcaaaaatggtataaaaaggctattcaggtacatattgtctatttaaaatctgtacacggtttgcaccttttccctaagtgttctgtttgtctatgacatgaaatattcatctgaaaagctaaataaaatactcaaatttattttatattttctaggcaaaactgtttttttaaattttcaaaattaaaaacatttttttaagagatggggtctttctatgttgcccaggcttgtctccagctcctgggctccagcgatcctcctgcctcagcctcccaagtagctgggactctgactcgaactgactttattttattttctctcatcacatagatgtttttatggagccattacagattcagtttaagattgctcagtctagtcaataggttgtctctttctgaaggaaaaagatggaatctgttaacttctttcacatgagtgcatacccacaaaaaggaagatggaaccccagatggagaaggaaggccaaacaacaccacaggttgttttcctggtgtctgcatcacatgtacttagtgggtgggacaatgaaagcttccaaatttagaatctatttaaacattgaaggttctgtgtttcaaattcaacttgatcttgttcagccttggattccgtctcctgctgtcacaacatcccttctcaattcgaaagggaagaaaagagattcataggacctcaaatagagtttctctggcatggctgtgcatcaagtgtaaatgaatcagaaaactgagcattaacttttacttgaaatagataagactttaaaaaatagggataaaaatgcactgatggtttgaaatagcaattcaagtagttttatggcacttaccaccagacatgcttggttaagagagtgaggtactccttcgacattatagcattcgtcggagacgttctgttaaatctaaaatgtaaatagcttctcccttttatattatgtttgactctgacattaatgctgtatcctttaagtgactaaaagagtatttctgactaagccttctaattttgtcataaaactttgctcagaatgaatttttgcttaaaaggccaactctaatccatttttcttttggccaatttaaagcaaataaatcaggtcagttctctttatgacacaaaagggaaaaatgataagttttcttacttcatactcttttatttttgaatttctacaactaaaatgtctctttttctcctttaagtacaagctgacaggtcattaatccttaatgtgaatttatacctctgggtattttgggaagaaaactcattaaaattcttttgttttatatgtgactgtcctaatagaaatttggagttcatgtttagaatttgtttcaatgaatagaaagcatagaaattcttttaaaagagttgaagtatatgaaattacttctacctacagtcaatgctgttgctctgatcttaaaagtctgctgctaacttttctgcagaaagaacataagttctgtaagctccatattttcaatgtgaatagatttattccatttgaattatctggataggcctatgcacttaatataattttctataatgtttcctgtttttctgtgaagcactgttttatttttctttaattctaccaaaaggtgaggcattgggcaatgatcttttttttttttaaataagctcttacttggtcaaagttagctagctatggcttatgtataggcccattttatggatactggtggatatattctgcagcctgttgctggatcatagtttcccattatttcctctctctccagtttcttccttctttatagagtgcttgaaagccttctaaatgaaaaagaactgctatcaacaaacttatatttcaagattattagagagattttatcatctgtaaaaacttcccatctcaataggggatgggtatacctgcttctctgattgtccagaatagcttctatctctttttattctagccactgataacaacacaagaactgatgaagagagatatgccttttatttgctttctttttcttaagcaagtatatcaaactcttccatggtcttaactgtattctaggcatatgtttgaaaactccattcatttcatgtttccatacttagcaaacatcaactatgccttgaacactgtgttgggcactgggagcacaataatgaccaaagtagtcatcatccatgccctttggggtaggagtgaggagaatgtggcaatcaatgctatctgacttgttccacagggaataaaagtgacagctgcgataagtggtattaaggacagacatggtgctatcatgtgtataataggaagaactaatttctactgaagcgcaaggaaacctttcttgaagtacgtttgaatgaaaggatgtactgagggacattctagacaatgtagcttatggaagaaagtggtgaatgactgtaatgtaggactgaaggaaggctgcagccttctttcacacgtaggcttaggaggggtcttgtgaggtgaggtgggaaagttatattgggaccagatcgtacatgactttgtggaacagacagtagaaaaaaaggatctaggagatagtgatttattagataagagaggtgagggagagagatgtgataggataagtaccatgtttttgacttgttccttgtactgatgatggttgttcttcattgaaatgttgcttttctcttgagttcattagattataaactcctatagggtcagagttatgtttccagatgaactagtaatcttgaatattaaagtaatcaattctggtctgcaaaattctctttttactctgaatggcctttactcttttatggtgaaaatttacaaatatttactcaagcatctgagttcctttagaaacaaggccaaagaaaatgcaaataatgttattattataactttgaaataatgttattattagaacatttgaaatgataataatattaatactgtattagtcaggaattctaaaagctcaaatcctccctgtattgtttaatgtatttgcataacattcacgggagtatctaaattgtgaatttccattacaaggataatgcaaaaaagattgactttggcagtttctaatcctcttatcgtttcttttaatataagtgataaagtttatttatctatacattttattcagagctatgctagtggatcaagtaagactgcattcagaaacctgggaattgttgcaggggtatgtgtcttctcccactatcactaaccttctcctcaaaaccaggagagtaacaatcttctttgctgtggtgattggggaatatgtatgtgtagtttcattacttgcttcagtattccttgtttttgtttgtttgtttgtttactgtttacatcaaaaactaccatttgttccttgggccaccctttcatctattgatctatgattccagccatagttcccttcaaacatttattatcaattacacactgtgcatgaggcactgtactagtgactctggacagagaaaatgacatcatctgtggaagccagcttgaaggcttccagtgctccttaccgcctgatactgtgcccttgtgtagtctccttccacagtgagtcaaggcttgcctgtgtaactgaacaagtattacggaggtgatgatgtgtgattttcaaggcttggtttcaaagggcattgggtcttccatcttgtttccttgaatcacttgctccttgaatcacttgagagaggcttatttgaagagggactgaggctacttatcgtaccaaattgtgagccacatgagtgagcagacaccttagaagtggatcatccagccctatgcaagccttcagatgactgcagtcccagcggacctcagacagaaacctcacgaaatactctgagccagaaatatctaaccacactacttttacattttttccccatcaaaacgttgaaagataatcaatgtttcttattgttttaagccactaacttttggggcgatttgttacactgcagtagactccaacactggttcctacctgaaggtattattctcccttctataacggaggagggtagcatggagctacttgatttacaaagggctttcatcctgataaacccattgtaagttgaaaatactgtaagatgaaaaggtcaaattcaaaatttgaagtacagtttccattgaatgtgtctcccttttgcatgattgtaactttgaaaaatcctaaatcaaatcatcgttaagtcagggactgtctatattcacatctcagccatgtcccaaacaataataaagttcaactatagcctcagcaaatagacagttacaattcgagcttttcagaattcatgccatagataatagtagtgacttagaattttctagcaatttgcaatttacttttgcagttcaccaagtactttcatacaataactatagtcctctgaaagcagagcagattttatagataaggagttaacaaatctgtattgagtaactactgcaggctggtcatgaactaggtactgaggtcatagcagaaataaagacggacaaagtctctgttttcactgaagaggggaggaacacttaaatggttaccagagcatgcttgctgccaaggatcaggcataagttgctatggaaacataaaacagggggaagccaaagtaatataaggaccaagaaaggcttctctgaaagcattttagttcagttgagccttacaagattgcaggagttatcaaatggaagaagtgtggtaggtaaagatgaggcagaatattctaggcatattaaagcctgagtcaggatacaacatgtgttgtttgaaaacctgaaagaactcaggtatggatggagcaggacaaggaagaggacacttggtgctagatgatgctagagaagcaggcagaggccaggtactcatcaccttagaccactcagtaccacatgtttgtgaaagttaaagggagaaacgtgaagtgcaaggctgcgtgtggctgatctagaacttgaactcagattttctttccaatcctttcatcttttagtactcactatttctttattagagtatccttgacagatagagagcgagcaaccaaatacctgctttaaaagagaggaataaaacagattcagtgatggcaaagacaagacttacctaaaattataactcatttgtggtagagtaaggaacttcgctattaatctaagattcatggaattcaagttttttttgttttttttttttgttttgtttttctgagacagagttttcacactggttgcccaggctagagtgcaatggtgtgatcttggctcactgaaacctttgcctcccaggttcaagcaattctcctgcttcagtctcctgagcagctggaattacaggcatgcaccaccatgcccagctaattttgtgtttttagcagagacggggtttctccatgttggtcagactggtctcaaactcctgacctcagatgatccgcccacctcagactcccaaagtgctgggattataggcgtgagccaccacgcctggccggaattcaagttttatgacacaaaattcagaatgtaatttgttttatccacttggtttcatttaaatcacatgattgttccacttgattgccagaagcatctttggcagtgttgcagagcatagatcacaggggctatcagagaccttgaaggatggtccagctatagccatccctattaaatccattggggggcatctagggatcatctagaagcgggtcaggcatttgtctgcattgaatgcctctggcttcagacctacagagaaaaagcaaagtctttacataaaaaacggttgatgtatttgttatcagaaacagtgagtggagagagatgggaagagtctgtgccattccacaactacttttggccaagaactaaaaagcataaaatgggcagtggctgttagttaaggagaacaaagtaggctgaggccctgaggcctgcttcactggggaacgggcatgtaaggatatggacgggacttatgaccttccatgtaagagaacagaaggaaggtagcttatgcagcatttatatgccgaatcaagaatgggtatgggcaaaggataatgctgattgaatatggagtttagaggagatagtcacaggctgctattgttaaaagtttatacttccactgcctatgacaccttgaaagattgaaaataaaggcaagaagagagacaggatgttactaacatccacttactcttggcagaaaaagattaggaaaccaagaattcttgaattactaaccagagactgcttcctcaggcaagaagaagctattactctgcttggagattagggggctgagaatgggagagaggctgatccttggaaaattgcaaagctgctgaagaggcagcagctgaacatattttccttttatttttgaatgtttcaatgtctgaagaaaaagatatcagtcatagtactgactggcagtgatccagaaaaacctctggagagcttagaattctgattggcacttgagtgaagttccctgacacccaagctgaatctgcggcattcatgcaggctgagttgtgttggtcacttttttttttcttcttatgcagagggaaaaaaagtagtttctggggcctgttaggcttaaattccttccagagcaattagggcacctgctttcttcaaatctctgtccttctatcagtgaaatattttaacatctggaacttggcagatggaattgttcttatattcttaacattttcctttttatttggatttttaaaaacataaccatcaattcttctagtcctctagtgtttctgaatgagtgctcatccctgagaaatgctaaatccctgagcaagaaagggagttacaatcaaggaccaaatgggagtacattacattcaccttccacctctaccattctagaaatctttggtctacaatcctagaattttcaggtttattgaaattttccccagaggggttaggatggaagagaaagccattctctttctcattcctgttcttcctttttttaaaaatatatacttattaaagacatctatgtatcaggcattggggaaataatatgtattagtccattcttgcattgctatgaagaactacctgagactgggtaatttataaagaaaagatgttgaattggctcatagttccacaggctgtacaggaagccatggctagggtggcttcggaaacttacaatcatgacggaaagcaaaggggaagcaggcacatcttacatggctggagcaggaggaagagagagaatgggggaagtgccacacagtttttaacaaccagatcatgtgagagctcactcactgtcatggaacagcaaggggaaaatctgcccccaggatccaatcacctctcaccaggcccctcctccaacatcagggattacagttcgacgtgagatttgagtggggatacaaatccaaaccatatcctaatgattagcacaacatgctggagtcttcacagagcttagagtgtagaaagaaacacacatatgaaacagagcttttatagtccagtgtgataggagccaaaataggaaattgtaggtaactaggggacaaagtagcgatattcagcttatttgggagggagagtacaggaggtcaaaaaggactccccagagaaattgccatttaaacaaagtaatagtgtcatgggctccttggggtgttgctttgctagccagaaacctctgtggccagttgcatcttctgcccctgctgcctctgcttgtgctaccagcccagatcctatacctgccaagggcgagacaggtgcagagtggtgaggggtgtgtgggtgagcaagtgctgggtctggcgtctgcacatagccaggcatactggctgctgtggcagggtgggcagctccgggcaccagcacaggtgctggctctgtgacaggctgttgctggatcagatgtactgcacgcagcttccactgtgggcactggcatctggatgaggggaacccagtggcactgggaagcttgtagatgccgggaatcacagagccccaaagacagtgtcatagccctggctctgagagcctccaggtctggttgccttctcattgaccacagtatggtgagtggggtctgtgtttcagccctgtttgcgttatagctctttcagtcctgccatttggcaggtcctgagttcttgtcctgtgaccaggaagaatgaggtatgtgcacacccaactggagggcgagcaaggtggagaggagcttcactgagtgatagaatagctcgcaggagacttggagcatgtagctcctttcttcaagcaggttgtcccgacgagtgtccagctctcagcagagaggagacctgcagtgggtagctctgcagtgggtagctcctttctgcaggaaggttatcctggtgacccgaagtgggttgcttcttcctgtagctggtagttcagacaactgtgtgagtctggctgtgtctagggggtttttatgggctcagaagggaggaagtgcatgctgattggtccatgggccccacaggtgggccagaaaaagcactatgagtaaattctcactctgggtgctaactccacctggaactgacagtccagcccccatgcttcaggctgtccctggcttgaaggtggagcttcactagggacccacccctttccacccaggagcctgtcagcctcctgctgccatcaattatgttgtcaatggcacccaggctgttcacgctgaggggcagctgcaggcccacgccaagccaccctcagcacccccttggccttcctcccatgcctgttggcacccaaagtctgaagggggccaagggggcaggtggctggcatgtcagcaccaccctgagtgtgcatacacttggccgggttgtgacagtgcccaggcttggtgacagatcccagctgtgcttagggatctgctcaagtataggctggatgctttcttgcccacaaggatataatgaggactcccatcctgacttctaaattgtctgccaatctgtatatctattatgacttcccaaaataggtacagagatctggcatttcccaaccatctactataggtagacacgcattgtaaagtgccttctggggtctggaatcagagtgtctgagtttgaatcctggcacagccatttattagctatgtgaccttaggcaagttacatggcctctctatgcctcagtttccttatctataggtaaaatgtggataataatagtacctgtatcataagattatgtgaattttaagtgaagtaaggtcagtgcctaacagattgtaagcattcaatgcatgtttgctatcattattattattattaccccattattacccccatcttacagtgggagagactgagttgcagggggtttaagaaatgtgttacacagcacttagtgatagaatcgaggatgccactaccctggtgaaggatgacatactctgcttttctggtagagagagcagatattgaacaggggccgagagcaacaagtgcagcaacagtggttcacagacatttgccaggtggtcaggacttgagaactgacaaaggtgagagggcaggtagtcccctcccattccctctttatcttttggaactcctctgagaggtggaggagaggtagggtagcaagttattctttcatgctacagcccggtcatggagctctttgttggatatggaagatgtaaagtggtggtcaagcttccagtagctaatggcatacagtgagaacacagttatctgcatggtctctcacagaaaatttaacatggctgagcctgtcagttctcccaaactattaataagtgtaagctaatttttcttcagatattactatgcattggatgctgttctgtgtactttacagatattaactcaattaatattcacaacacattggtgaggtaagtactattattatcctaattttatatacgatcaaactgaggcatggagaggtgaaacaacttgctgaatcttatagagctgtaaagtggaatcaggacttggccctagatagtcagactgtagagcctgtaatcttaacctccatacttagaactttcttaactgtgaagattaaaagagactattgaaacaccaataacattgttccccaatccctgtaggagcacagaatagcttagtttgccttcttcccctacagacttgtcttcctcaacaagaaaataaagctttagtttatttaacaaatatgcatgcatatttttattatatataagctatttaggtttcatagggggataaaagatgaataagatttcctttaagaggtcaagatctaataagccaagctttctatagagacaaatacacactcagagatccaatacaaaataaagtattaaatggtatcacagagggataaagtgatatggaaatatgatcagtaccatgggtttggaggacttgttcaaaaaacatttgtgatttattagatccttaaccactgattccaagtggaatctgggggatcggaatggagatggttgttaaggtttgaagttgtttgtgttcaccatttaaacatctagtaatttcacaatccttttgtgtccaaggtatcccatttcaaattattacctatctcagtggccttttcacattattcacaatcttacattactttgtactatgtatcttaaaacatttctgtctcatttagactgcttagactgaccacataggaattgctttggtaaccaggactatcgatatctctttctgtgttaaaaattgacttaaggcctctctacagtttaaaaaaagttgtcattttacattttgattacttttctatattggagatgtcagtagtgttcaaagtctggaaactggcctacctaatatttttactgctctcttttcattgggaaatatcagtaatttgggggactttctctaaaattattctatgtctgcaacatctggtaacatgaaatacttcgtttgcttataattctttcttctgtgtttttaaaatataaagagatgcctcttctgtttatttgtgcccttgtaaaaaggatccaacctgctgacaggtgcccagctctgcctgtggggtccaaatgaggtatgcttgctctgcctgggagtggggagttcaactgaagctttgtgtttttgctataaacaatcctttattatggatcttgaactctggctttactataacgtaattcttagagagtagctcaattctttcagtgtaacttgatataatcattcatgggtaaatcataaccaggattactgatgaaagagccagggttggtagaaagagtcgtagggacagggaaacttgccccagtcttgctgctcttacattgaagtgtctcgtatctaagagtcttaaatatgttttatgaatctatttgcatccttgcactcaatctggtaatatgatatgttttggctggactgtttatatttcaagaaactttgtttgtgtattaaaataaaaaagatgaatgtgcatcacatatgttgaaacatttgcaattagttggtgctactctcttaagtgattgggcagggcaggcagacagccagccttggcaatcttttcagattctttttcatgccaatttgcaatttgtgacagtgccacatttttatcgggagggctttattgagctttggaaagaagtacttcttgacctgaataggtgggttcttggctagaaccctagaactgtttcttcctctaatatttttccatgggaatgttggggataaaacattatagaaagctcagtgtggaacagacatcgacccttttacaagttatcatggagaggtttgcaatacagtttgctgtagagatggagtgatagtaacacagaaagtcttgaacgatctcatcatgaacacaccgtatctatcttagttggttagataagaatggaatcaattgactaaatcaaatgaaaattttaatccaaaaacactgaggaacctaaaatgctggaaattcaaatcccaaaacacgctgtttgggatactgtactagaacctcatagaacaggaatgcaaggggagaagattgtggagggaggttgtataaatgggtttgagaatttattcctgatctcaaagagtagggagtttagtatggaattcgataataattcatagaaacttaattaataaaagcccatgtcatatgaaccagtgccaaattgattgctggtatgcaagtagagaccacaggatctaagaggaaatgaggaccctgaatactgtgatggtcagagaagtttccaaagaagacatgagttttgttcagtcttgaagagtagagccaaatagccaaggtagaaaggggattaaggaacagcatgaccaaaaattctgggggaaggaatggcatgttaagagaataatgaatatatatatatatatatatacacacacacacacatcgagtagaaacttcacatactgtaagttggagatttattttaggataaaagtagtgattttcaaaacttttaaccttttgcattccagttggaatagctctaagatttttctttgtgttggttttctgtgttgttttacatatttgataatgtggagtaaggtatttcaattgatttgagttgggaattttaatgcatcagactatgaaggagaaagtaaaacaccatgcaatactctatcccttagagaaaagactattgttgacattaggtaaatattccaggcaattctctttgaatgcataaagatggatacatagataattattagataatcataaataataaaaatgggatcatgctatacccgcttataaattatattctctattattttcatgtaaaaatagtgtcaaaatacagttaagactttacatgtcagagaattcaaaatgacatttcatttcctagtcatatctcaggcaccatgtttctcataaccttaatacctttgtgacatttatttgaaaatagtggctgtgcaatcctttattttaaatttcctgggttcgtgtatatatctctaattcttattcacagtgctgcatttattcaagggcagatttttaaactttttttttttttatagaggggaatggagtgcagttttgctatgttgcccaggctggagtgcagtggctatttactacagtgatcagggtgcactataggcaccaacttttgagctcaagggattcttcccaatcggcatccaaaatagctgggactataggtgcatgccactgtttctggcttcaggagataatctttttaaaattatactttaagttctgggatacatgtgcagaacgtacaggtttgttacataggcatacacgtgtcatggtggtttgttgcacccatcaatccgtcatctacattgggtatttctcctaatgatatccctcccctagcccccaaccgcccaacaggccccagtgtgtgatgttcccatccctgtgtccatgtgttcttattgttcaactcccacttatgagtgagaacgtgcggtgtttggatttctgttcctgtgttaatttgctgagaatgatagtttccggcttcatccatgtccctgcaaaggacatgaactcatccttttttatggctgtgtggtattccatggtgtatatgtgtcacattttctttatccagtctatcattgatgggcatttgggttggttccaagtctctgctattgtaaatattgctgcaattatgatcagacacttctcaaaagaagacatcgatgtggccaacaaatgtatgaaaaaaagctcatcatcactggtcattagagaaatacaaatcaaaatgacaatgagataccatctcacgctagttagaatggcaatcattaagaagtcaggaaacaacaaatgctggagcagatgtggagaaataggaatgcttttacactgttggtgggagtgtaaattagttcaaccattgtggaagacagtgtggcgattcctcaaggatctggaaccagaaataccatttgacacagcagtcccattactgggtatatacccaaagggttacaaatcattctactgtaaagacacaggagtgaattttttaacatgttaaatacattgtattaaatgacactatggatgcaagtggcagacataacttgtactaactcaaagaagagggaatttattaaaactgcactgggatatctgatataaatcaggaaagacagggaaagttgtgtcccaggacagtgaaaaaaaaatggaatggaatctctgcttatttttgcacattggccttctcttgcacaacagaccacataactacatggtggggaatatggttgttcaaggctcccaggctttaatttccacagccctccagagaggtactgactctttttcattagttccatcttggaagactttggggaaagactggtgtggcttgggttaggtgcccaatggattttgaatagagtcacatggcacacacctggtaattggagtacattcctgtttatcttgtgttctaagatgagggagctgagcagccaccctcctctaattggtgccagatatatacataaaactacacttgggttgacatggacagggtgcttaaaatgcgattataaggccataaaatttagaacactttggaacttcattgtttacaattaaggaaataaggttgataagtgtacaatttatttacatgcatgctgtaatctttaaaaaatttcctttgtgtattagcactatatggaaatagaaaaaaatctagactatccaagtttgtaatttaagaataaagcagtatgttattatcagtggaggaaaaaggattcaaaacagctttctggtgcaataaagtttgcctgctttcacacctggataactgacttttagaaatatcaaatttaacttctaaaatatttttcctctgctctgggctgtggaaaggaggctataggtgaatattaaaaaatggtgactaatcttaaagtataagatgaaaatggacacctaaaatagaatctgagaatcagagaattagaggtggagctgaactatctttggcaggcccggtcacttgcatcatattaagtcacaaggtataagatttttgagcaagacttctgaaaattgtagtttttgatgggtgcaatattagtccttgaaatattactatccagaaggagaaagtaagtatgcacaccagcaaacaggagaagatagctgagaactatgtggatggaatcctgctgaagacatgagatggtggaagagtggtttctgagggagtatgtaccagagagggtattatacctagcaaaaagtgagggtgaggagatcagcttctgatgctggactccaggggcaggagacaagagcattggtcatgcagacagagcaggtgagtgagtcagaaaaagaacgaaaaagataacctgaagagaagttggtgaataagtataaatcttgaaccaaatatgaagttggggctgaacggaagctattaaagactatgctctgggaaaggacaaacagaccagagagcaggtctacagttgtagctgcaccatccaatagatagccaccatccagtagatagatagccaccatccaataaccaccatctaacagccaccatccaatagatagccactagccacaggtgactctttaactttattaaaataaaatgaaattcaattccccaatctcattagccacatttcaagtgcccaataaccacatggggttaggggttcaaagtcagtgcaggcatagaacatttccctcatggcagaaagctctattggatagcactgagaggctatgacagtgagcctgaagtgaacatgaacctgaagccttgacccatgtcctggcttcattcttcttttcatagttattggaggttgactatgttgggaatctacttggattctgacactaacatttgggggcaagcatctagcatcactagagagacagatactggagggtgggtttagatacgaaactctgcatccagagttctctacttccttccaaaatataaataagtaagtaagtctaggtctaggctaccaggtaaagacttgttttaattatggttagccaaaccctagagtgatccttctgcttccaatcaaggctgtatctaagccatataaaacagtcgactggccaagctctttttagatgttgcttcatttctccaaggacatgctaactttgtccaggatttagtgggaaaattagaacctttacagatgtcaggtctttttacataatagcgacaacacctgccttaccgcaagaatgtggtggtttaagatcctgaaactaaagccatctcatttttgcataactcaatctgttcatgaacaataaatgttaaaaattgaaattcacattctgctatttgtaaatattaattctttggcttggtgtatttattttaacttagatattttttgccctcatcaatgattcttcctagaaacagggacctttttacagtaattgactccaattttgttgaactggtaagcaattaggattagcatatttatttagtttttttgctaaattttgctcttttaaaaatggtattgaggaataatgtcaaggcaacacatagaagctcattttctcactcgttgaactgttcctatttttaactcaatggctttttaaaaaaattacatcggctttctgaggctattaggctactcttcaattaggtgttgcttctgtgtacacaatagcatgccagaagctggaaagtgctcatgcagtttcagaagtgtttaatttgctaccagggaatagcttagtttagaacagcgtaagaaaagcagagaggagaaaacaagatactatttctcacacctacagttaccaaagaaggataataaaaccaatgagacctaatgtttattgagtgtttacagtgggataaacattgtgtcgttctttcatgtgttttcttcgaccctcacaagaatgatttcaggtaggtaagattgttattcctattttgctgatgaggaaactgaggcttatagagaaagagcaatttactcaatgacacagagctagtaagtggtggatctaagatttaatactcaaattgtttgattctagagaccttgtttttaaccaccactttcatatcttagttgactaagatggctgtttactgaacaccttctttgctttcccacctgtatcttttctcaagctgggctggaaataccctactcctagttgtctttgaagttttatcatgctttaagattcttatctcctccaagattttccacatctcttcaaccaatatgaacattcttcttctcccttaatcttgcaaaactttgtgtttccattccattatttgcaaagcctgctttgtattggaattttatgtctgtactgtgagcttctgaggagtcagaactttaacatatagaagttttatttcccctggcacctagaagtgtgttttaatgtggtaggtacacaaaatatttttgttgctgacaattttgaaatttcactcacaacttaatgaacactgtatttgctgactttgggttgaaagggagggtgaaagggctgaggtttctttttttttttttttgatagtctctttagttgcacttccttatgtttgaggacaagttgtctgttgtcctttaatggtgaccttcagggttacaggcattcattcaacagatactcattatcatctttcagtcttctaggagccaggcatatgatggtgacaaagactgattgtgtcactcttctcttggagttaagggataatctggagaggcgaaagattgtcaaaagttgtcatctaaatatataactgtaagggtactatggaggaaaccaaagaggtgttaggatgaagtgattgaggaagtgatatttaagggaagacctgacaggtggaaaggagaaagctgggatgagcagaggaaggtgtatactcattatgggacatgatgtgtgagagtcctggggtaggcagaagcttgaagaattcagtcaccatctgttcaaatgtcacgcaatacataatatagcaacaattgctttctggtggtcagttctccataatccatgcatgacaggtttatgtgcatttcatggttatagtttaaaccgtgcccatatttccattttgtaggggctttagcagccacttaggggtaagtcatgccttttgtaggcttgtttacttttgaagttgtaaattgggtttaaattatagcttcttacaaagcaatcatcatatttactgttcattgaggacttatatgttaagtagtatgttaaccattttattcatattatttcttttaattcactaaagcagaaatcttggcaaatgtttccacaatgggccagatagtaaatattttaggctttacagagctcatcgtctctgttgcaactatttaactttgctgttttagtacaaaagcagctgtagataatatgttaataaataggtgtggcagtgttcccgtaatgctttatttttggacactgaagtttgaatcttatataattttcacatattgtgaaatagtctttttttttttttttaaatgttccaaccatttaacaatgtaaaaaccattcttagctcacaggtcatacaaaaacaggcactgggcagcatttggcccaggggctgtaatttacctactcccacctgctctcctcattgtccccgttttaccaacacagaagctggagtcactgggaagttgtttatagccaacccaggtctggtagattccaaggtccatttctttaactcaaatgcctcacagcattaacaatttgttgggttcccagaatgatttcttaatagtttctggtgtataaattttagtccctaagcagattgcatgtttctcagagtaagaagcatttttttttttttttctatttgtcttgtttccctccacaggaatgatggacttacaggaggcattcggtaacgggttatctgcccttcaaatggtttctctggaagtggctatgaactgtagatttttgggaatacatagcaatcatatttatattgcccacctaatttagctttttaaagcagggccctgaaaactgattagaaagatgattaaaatcctggatgccattttcacatcatatttgtagaattagtgtcatatttccagttttcaaatgcaaatcttgtaaaacaaaaaagttgatttctcttcccttgtggaataaattgccccctagtctcctgaaccatggggaattctttaatttcttgtttttaaattgtgcctgtggggtcaattaaaggtgaatgtaagagctttcaaaatctaaataaaatgagtaaataaatagaaaaagcttgaagaaattcattaataatacaccagtagccagtttgtcttgatgtcttgctgtctctggacctcttcatctcccttcctagttaccttaaaattaaaattcagatgtgacaaaactgtcgttaacatgtagaaagtggctaatatttttaacaatgagaactggccttgtcattttggattctgcttataacagacattttccatagattggaagatccaaaatgtaccttggtttggtaaaaatatatttaaagcatacacgatacgttacatacaaaaatacatatatttttacaaacatttcagcttatgataacatttttagacatcaacttaaaaacatgtaagtgggtagtttttcaaaattcttgtgggaggtatgatagcaacaaattttgaagaccactgctttagggcatttttgttttaaaggtttctctgaaagccagaattcttcaagatccctaatgattatctaccttgaaaggcccacgttttactagaccaccacactccaccccccacgtttacttgaatggtaaatgttaagagaatgctgatgaaatgacacgcatacaagctacagtagttttgaaaagagtctttttcactctgtagtatttgcaggaagaggaagtgttttgatatttaccttgggtagaaacatgaaagggccgttttgaagtttcacatatttcagacatgcagaagtatgtcattgttgacgatggtaaacagctggtaaagataactgcctggaacagctggaggagggagttgacattaccctgtttagaagtctggaaacagagaaagcatatttttttaactacagtgtacatcagcagcatagatgcatagtctatgtgcctataaagcagccattcaagcttaaaaatatgtttctctttgcttgtttgtgggacaaggctgtgaacaaaataaattaagtgaggaggttctgacctccgcagctggcttccacaaaatgatatgaggacttggggggaagagaaatgagttttgtctggcctcggtggaaccttctcaagggagccttggtggcaagttatatttctttggaagtcgacttgactttactctggttcagggaaggaagattctacttaatagaaacctggtgtccctaaagaatcaatgccgcttccaattggcattttcaaatttaaacaaattattgtcttgtgtaggctcagccttttcattagattttcatggggaataaacttcctgaatttgctgcgggctgagtgtgtatttccattaattagcaatgcaggaagcagacaccaaaaggtgagcaaacctaggtaagactcaaaagctcttgaacctgacaaagctaccgaggttcacaaaagtgaagttacagcttctacactaagtggaatctcaaggtcaccctggagaattatttggccctaattttcaatggcaacatcatcataatgttctttggaagcacacttttatctgtcttttaaaaatgacatttggttttctctagtataaagaaggagtgttacttctgccagtataaataaataaataaataaataaacaaatacttgatttcaagaattctggcttatgtcacttcgagcaaccccagtataagaaaatataaaataaagacaacaaatatgcatttaaagaagtcatgtaatgaattttagtgcatttaaaatatcattggatgtagaaataatgatttattttttacttaagaaaaaatgaacttaaagccatgtttaccgtaagttgaaaagttgaaaaatgacaaccatctggaaattatttggtaaaatatattgtaaacatatatatatagtaatttcataatttagtttacatagcgaaaatccttaaacattgtaagtatgaattagtcattggatacataatattgatttaatctgctaggcatttgtttgaaaagtatttgataaaatccagtttttaatgctgcaacttctgacaatttgtgaaagtgtatctgacttctacggaactcaagagtatactgactatattttagttgagcttagttatttgtgtgtgtgagtgtgtgtctgtgtgcgtgtgcatgtgcgcttctggggagggatggttttcttttgaatttttcaagtttctttccgtaatgaaaggaaaattgaacaaacatcatcctttaccatcgcttttagtgattatgtacccatttgaggctcggttttacagcctgttctctactcttaaaaggttattataaggacagataaataataggttaagtgatttttaagttactcagatgaattaatttgtaaatttaacattgtactgacattcggatccctttaaaaaatttagcatgcaagtttgatatgtctatgatgtacatgtcacagaaaacaaatggtatatatattcacttaggcattatatatttttttcctggggattttgcattattcaatttttatacttataaaattagttaaggttgaggactattgaagtcctgtttcttctaaggtgagcagagtggttgaaattggaaagttcatttctgctaagtatgtaagctcatgagctaattctgaattgcctgggaaaattctgttcaggaacagaatgacagcattggtacagaaataaaaccttaaaaaggataagagtgcttcagaattagagtttggaaagtgacagaatagcgtacctggaaggagttaatgaagacatttagttattagggctcttggaagaatgtttcctgctaaatggcccacaaaatctaacatcaaccactgccaaagtgtttttttattggaatgaactttactattatatcttaagtcagcctatgcaggccagttaactgtcatgtctaagagtctaccatgtgtccaatggagattaaagatgggtgtcatttacctttcaatatcataagtaacactcattaaacatttactatgctaaagctttatagaaatcagattttctaataatcctgatagctctctaaggtatatattatcatgatccttattttacagttaagacattaaggcacagagaggttaggtgacttgcccaggtcatgcagttgataaaggctgatgttagtacttgaaatcagggaactctgaagcctgtgttctgaatcactgcttttactttgggagtagtgcttgaagagctcaccttctaataaaggcgaatgggtacatacaattttaatatagtaggataaatataatcaaacaactatatgcaacgtgcaggaatcctatagaaaaggaactattaatattatttgtgggaataatcttggtatgggaagaaaggcagcttacagagtcagtgacaccttggtaaagcactgaggataaagagagcccttccaggtgggcaaagtggggatggtcattcacagctgagggaagagtctagcaaatataagagatttgctactacaacatgaattcatagagctgcagatactagttatgataaatttttaaatggggtgggagtgggtgaagtgttcaagagatgagaatagagactgacaacaacaaagacagttgggtcttttcagccagagtacgatgttttggccattaaagggtaaagtttatttagctagattgcttagttggacatgcatggtggacagacgtggtggctgggagaccacttcgggtccagtgctagaatctaaccaaagataatgggggtgggcaagtgggtggatggtagagcacctgtgttagggaatacaagagtaaaagcaggcttggggaagatagtgagtttgaataaaggttgtacaattacttgatgagtcattcagtgatattttgtactttctttatgtctagaattttctttaatgtacatttgtatggggacagatactcagaggaaccagttttaaaaatcaaacagcctctatttgctcattcagtcatcagagttgtctaaagaattagaagactgagtaaatgcctccagctctgcttatgtagtcaggtccaggatgtaaaaggaggatccgggtggggggcgggggggcagtgtggggagcagtagctatcacctttctacttggcaacatgccttactactctgaagaccagtcattctttagctactgttaatgctgattacacagaaaattgcacaacacttcactttgatttggccaattgaaatgcccttttagcaaacaagtggcactaccaaatcagtcaattcctggatcaatgcaaatctgagagttcttttactgcggagagtggtcctatcatttgagtgtagtcaattagcagaggtgatatgaaaacctccagctctgctatagaaagcaaataggctttgcatgattattaagcagttttctcatgtgttctttccttgatggagttaaaggcattagggtttgaatcctgcccatgctcatatatagagcatatgtcatcctctccatctttattgctattcatattgaggtcaattatgagctgctgtttaatgtcaccatgaaattgttcaattattttctcccagcgtctaagcagctatcctcaaagggatttgggaggagtggtattaatactgaggaattcttaagaagccagtaggcctgcatggctctccttttataattcaccccgtctcaattatgagatccaaaatgcttgataagttgttaatgaatagcttagtatccaatcttctctttggctaatattggggcacatagacctggttcccttccttggtggtggagttgtaactaaagaagggaagctgctatctttgtcacgtttcccctctctcccgcaactagactcttctggagcgccaagggcccttgcttggttattcctaactaaggaacaattaggatgagttttctttttccattttaatgttggaatgggaagcaagggggtaggggaaaagaaaccttttttattgagtgaaccataagtatatttgtacagcgtcagtatttttctgtttgcagtttacagataaaatgtacttgtatctctgttattattgtcatgatctgcagggggatgcaaagagaaatatttctgtaaagaaacaaatatcagtgcttttcttgaaatagatcatgtttcagttactccttttttctctgtatagcctggtaagagttttctgaagccagcctaattgcttctgatcattgtatgcctgctgtaggctctgggatttggttatgtctgtagcaatgcaaaatcagcaaagtgtctctttgagacatttcaatttgttcatttattcatccaaacttttatgcataaggcattgtgctaaatttattgggagaaggggtataattggatgaatcagccagggaccctctttaaaggagtttgtgatataatggaggcagtagacatgcaaacagttaactcaaatacaatgtagaatgaactgtgttataagaggaacaaatagaaggctgtgggagaagagatgaagaagcagttctcaaagagatgacttcctggaagagaaaatatttgagctgagccttaggagtgagaaggatagttataggtggcatgggattggttggacattcaggatgagagaatgccatcagcactcacgaaggtcattacgctctacgatttcatcttcttaacaattccctgccatgacttttgttgtggctttcagaatccttctatttcctaatgctgtgttactcctctgggctcatcatttttgaaaatctcattctcatcctgtcttccccacttagtaagtacaatagtattcaattttcttggcttagtgtatgaggtctgccatgatctggtaggcacctatgtctgccatttcatgtctttctgcattttaatttaggattacctattcatcaggcatggattttcacccgtttgtcttactgccttcaattccttcatttcttacctgcctgtcaaacactaagttcaatcacttcaatttgtactattgttagcactcaagacctggtttattgtactagtactgcaggctagtatgagtggagccagtaaacagcaccattacagagtgctgtttaaccacacttgttcataacttgtgcccatgttacccttagataggaagatttttttttttttttggtgaagggagggattgttggtattagtttagtagcaaatataattttcatctttagtcattatttatgtatctttcagtcatattacgataactatgcagatgctaaaataggttaattttggaggaagagcttaagaaatgaaagatgtgggattgtgggagtgagaattatctgaagacagtattagtagttgaaggagggaaggtggcgttggtggagggtattttccaacattttcaaatttctttctaagaaaatatttatttatatgatgttggtcttcaaatgagaagtttgattcagtaaataaatattcaaaaaatgattattgcagggcattgggtatatactcgttctggggtataagaaagtaggcaaaggcctactttcttactgtgttgactttttaaccgaatccttggaaacccatgccagtgattgagaggaaccatgtaaaaagctaatttggaaacctgaaatcccaatcaggagattttgcaaggttcaatttatttcctacttatgcttttgcccattcagtgcctgacccactggcttctggtggtattggcttccttctctgatctatctgtttagtgtcagttcccaggtatcagattgcataactgaaccatctacttgacgtacctctgtgcaccacatatgtgaaaggcctgtcactgtggtcagatctggtttgcagatcctgctgtgtggacctgcatcaatgtctaggctctgtctaggacagtttgggagagatcagacgtagatgttcagagcagaaatgtggattaagtggtatgacaactagttctaagtcttgaactttaagccacttgccttcattgaaccttctctcttctctattacttatgattgacttttggtttcacaagagtatttaaattttattgcataatataaatgaaccactttgttttcattaggggactccatacaaatgcaaacactttgtttaaaaacagaagtatatacagttgtccctctgtatccctgggttctgcatccctggattcaaccaatcttggatcaaaaagattaaaaaaagttatgtctgtactgaatgtgtagacctttttttttttgttttactattgtctacataatatagcataaaaaccatttacataaaatttattgcattaggtattataagtaacatagagatgatttaaagtatatggaaggatatgcataatttatatgcagatattatgacattttatatcaggaacttgagcatccccaaattttggtatccacaggaggtcctggaaccaatgcccctcagataccgagggatgagtttatatacttttccacatggtgatcacaatttcttccttcctgagccttatgcaattagttactatcatttctcttttctgttttttttttaaatcccattaaaggaagtaaccaaacttcttttattagtatctgaattttaatctactatggtgtttggtcataggagaaccagactaagaggaagtgaaagaaatatcatttttgttgccaaatcacttttcaatgcattaagggaaaaaaatgcaaaaagacaatgctaccaaactggtgtatccagtgactctgaggttacccaagttctcagcgctctctacctgttcttcaggatgaaaagttctcagtcccttcaccattttccttttcttcctcatgtgaagaccaaggtatattattccaggaatgattagtgatgttgacccttgtcctcaccaaagttatgcttgaatcgtctttcattgaaaatagggacaagtcccataagaggtacatctactcatcatggaatagatcatgtcaggacccaattccctaaaatacaggaagtcactgtgaccttgtgcttatttagggcctagctgctctgtgatgagaaactccttcacttcccagatttgtgatccaactggctgttcttcctgtaactcagagccacaatgctattctaggaccagactgcaggatattcggtaaaatgccatcatttgttggctgctggaaatatttggctttaaatcagttacaataaaagtccagaccgaagaccaatggccacattttagcttaatcaatactgaaagttaaatacttttatgactttcaattttcttttgcctccaatctcttatatatatgttatagtaataataattagtatgttcagtattggtggatatagtatatcagaaaagtacacaacttgcttttaagagtacaaacaccagtcatgttcattgtaaaacatttagaaaatgccaataggcaagagtagttaaattctgttactcaaaaattttacttttgttaatattttggtgttatatgcttttttagttatttctctttatatttaaaatagttttgtaagtgatccacgaatgtgttccaaatttttcttccttcattagagatctgaacacattattcctaaactcaaaaatctttacttgctttctgttgtgtctatagaataaactcagtctccctggcctgtttttaagactcctcatggtcttttgactgtttccccttaaattttctgatttatactttggtctctgacatatgaataggtgcagttttgggtactgggttcctttgtctcaaatgccctttccccttcattatccatctggctaaggctgttcaaatcctctttcctttgaatgttctcagaattaatgtcttgctttactctgctattcagctcatttatattaagcataattctcagtctttccttaactccatgtttacatactgttttctctactagatttcaagtctggaaggagaggattgtcattctcacaatttgttgtgaagactcatttactgtcagtgttctccactctgctattatctgtataaaggcagggtccaccttcatagctccaatatcatgttcctgttggctggggagagaatagtacaaactcaacaatagtggacttacccttgtgtctttttttttgatggagtctcactgttgcccaggctggagtgcagtggcacaaatttggctttccgcaacctctgccttcctgccttagcctcccgagtagctgggattacaggcgcccaccaccatgcacagctaatttttgtatttttagtagagacggggttttaccatgtcggtcaggttggtctcgaacttctagcctcaggtgatctgcctgcctggggctcccaaagtgctgggattacagacgtgagccaccgtgctctgtctacccttgtgtcttttgcagctcttagcataatgcctagaatatggtaatgcctaagagatatttgttgaattgaattgttattgactgtaagtaaggagcatacatgggctatgtccaaatttgttggaacatttttgaaggaagtaagcttattactctgaaacctattcagtagtataaagcattttgaatagaaatacagttaagtattattccaggtagcaaggtgtattacagagtgttcttagtgacctcaatagccactatcacctttttaaacgttattgttcttactatttttgtttttgtttttttgctcagctggacacattgtcattaagattgaatcaataattttgtcatcagccaccttccaggtagaggattccacccatttgcttaagacccctcaagtctgccttcatcattttgggtatcatgggtctttactatcatttgtttagcttttccacattttgtgatatcttttcagcttttacctattagaattatttttccaagtctacttttggatagaatataattttactgtttttggttgttctctaagtgacattgaaaggtacacactttttatttttattttttactctctccaggatcttagtaggaaggaatgcattttatctttcaccacactgtgtaatctccttggcatcctctcctttatttgttggatttttcttttaattaaaaagtcattccaggtatgttttattgcttatttattctttccttatttactttctcaaaaactaattgaacataggaaagtaaatctttaattctgctaaaaatatcaagactattattgaaatctattcttacacattctttaaaatgagcaccccaaatcattgttctttcttgggacaaatgcaatgaagatagtgtgttagctatgcgatatcatcagtggtgtgcaaatgaggaaaaaaataaaaaaaaaagtggatggttctatcctttcttctaaagactaagctggtagctgcccttaatgttggtggcattttctaagtcagaatcatgtactacttggtacatttagaatgatataagaagtgattgggattaagttgttataaaacatcatgtattttttaaacttgttgattcaatgttctctgcaacccttttcaatatagcctgatcttttatatttctaattatcttgtacaaaaacatatcttgagcacctacctacaatgtacccaacactgaatgtactctttgagtggtacaaatggaatataaggtgttacaatgagaaaatacactaaaatggtttcgcctgcattttctttttagttgcgctattcctgctttcttactgtatgatttcctttctttgttacatagtagattgcctttctctcaccacatttttggttaaaattgacttatgcaagaggggctttgaagtgaacaatataaaaaatataattttcagtcaaactttgagcttcatggttatatgtttttcattgcaatttagaatctataatattttatcatactatatatgccttatttgtgatttggaatttgtacctgaattattttctaaaacaagatattataggcaggttccaatatggtactagactactagtggcaatagcataaacaaataccagttttgagatttgtgaatacacatttcttacaaatttgtggctggtcaaaatgctgactttctgattaattagaagtctgtagcctcaaataagcccaaatctatttattcatgtcatagaggggatacactgagtacttccaaataatttatattatatggaaatagtaacatgcttgccattttttctccaccattttagattgattcttaaatatcacaacattgtacatcattgctaattgtcagaactgcgtaccatattgccatatttacttctatagcttttcctttgtattttaacatttgaaataacttcaagtgaattcattcagattcattcttaattactagattcctaataggactgtttaaggaatgccttatatttgatgtgtggaaaatgaaaggtgatataaaaatgcagtgttatagggtagcttctgtgtaattttggctcactggaatgccagttggggaatggcaaaggctaatactcaacagatggcaaagtcctaaaacctataataatggttgcagttattttcattactgtcatttgaaggcacatgcaataatgtgaaaaggcttgaactgggtaatcacagtaaatatactcaaagggaccagatgcatttcaaacaatcaaaacggtgatggatattcaggctgagtgccacttctgcacatattctaggtacatttattgctagggattagaagcaacattacttgtcacagagaggagctccatttccccttttagtaataacaagcaacaaaaattgacatctgttataacacagacagaatatttcacatcctttatgattgtgtgtcattatcatgcatataaatttagtttgcagatgttcaacgtcagagatcaaaataccaattttgcctacaaaagagttgcaatggataccgaaaatctaagcacttttgaaaatagataagttaaatcttttagagtggggacaataaaaatcaaataagattaggaagaaaaagcatcaaaaggcatcagaaggggctgtgtggaagtttcagaagatcttaatatttctatttgcagctttgtaaaagcaccattcttgattttaatctccagagactgtagtttggagttgttatacatctttgttattttcttccatacaataaataaaatgaggccaacattttttccttgaaagaatctgtcattccagaaaattaattagttcacatatgaatattcataattcttcctgtgtctaatatgtaaaaatagttcttggtgattttgtgcaagggattgggtagcaatgacctacaatgatgctattaaacatagtacaacagacaagttgaccttttcaggtattcagtactcaatttaacatcactgtttgttctatatataatttcctttattacatttaggaaacagatgaacagattgatagaagatgagaggaaaattgtatattttgtagtacaatataaaacacctaagaataaaaaaaaatatgttttatggaaaactcttctccttttccccaccctacgtaacccctaaccacatacaacttcaaccaaaggaaagaaacctacgttacttgtttgaacaatcttgtgcctgcttcaaaggtactgttaacaatgtgatgtattttgcatttgcctctggggatttaccactcaatattaaagtacttcccactgtgacattttaaaaactgtctctttcctctgctgagctaaaaacataatggggatcaagaaaaccatctgaaacaagcatagtataaaatttctgccaggcattggaagttaaggcatggtttttgaccctccttttgtactgggcaaagatacaggactgctgccctctcactctgccttttcaaaagcttgttaaatgaattgcctctgccatattgtaaacttgacatatttgcccagggtctttggttcaaatctaagtgtatatcctcctagtccagtgaatatgtgcagaatgatatttgtaaatcaagacatgatagtgatgctactttctgaagaatctaaaaaaacagaattggtaggaagctgggattagatgatgagaacatatagtttcttgaaaatatttttatttttttctagatatatatttctaccttgaaaagcaaaccactaattttattgattgcttgatttctgatgttttgtgaatataacctattcttagtaaatttggtaatctgaggacatattttattgaataattttagttggggctttaattctagtttttcctgggacaaatatacggttggactcatatatatcctgggaccaatacagtttaaattatagtaaaattaacaaaattaactcgaagtttgaacttgaacagtgtgaaatcacattggaacattttaaatttagtagcaataattggcctatccataattaatacagtacttatatatattattgcttaaataggtgtttaaattttacatgctctgggtgattttgcttaaatgagttaaaagcacagtttaattaagaccaatgagttgctagaagaatgcatttggcttcatacttttcttggatcgtgtcactcgatacagtactcactaactagtggcaaataaaaaagtcaataaattcctgtttccatcaactagactaatgaacttcattagttgatcatgttatcagtataattactacagaccacattttgcccttggctattaatgcaacagacttctgtacttagaagaactgcctaagaagagaactcaggttaactctggcaaataactttgactcttttctttctaaaatcattattatatcctctggaaatagagtatcccatatactcagctatgatggttttcacattgaactgtgggaatatgttgctagacccctttgctttgttataattgtgttggctatgcctttatgggatactgttgtgggttgaaatatgttccccaaaaagatctgttgaggtcctaacatctggttcctgtgaatatgacccaatttggaaatagagtcataacagatgtaaattaagatgaagtcgtactgaagtaaggtggactcttaatccaatatgactggtgccctcgtgaggtgagaagagacacacacatacctagggaaaatgccatgtggcgatagaagtcaagatcagagtgatgcagctgcaagccaaggaatgccaaggattggtggtgaccaccagaaactgggaggaggtaaggaaggattctatccggagtctcagagagaacactgctttgctgattccctaattttggcttctaccctctggaactgtgggagaatacatttccattgttttcagccacccagtttgtggtactttgttatagcagcctgaggaaactaatacaaatttcttacttgaattattaaccataatagattaactacttagctagttaggaggaagtgatcagctgttctcagggataaatggaagtcttgaaagtccaagaattattcattaggacaaattcttaaaaattcagtgattttttttttttttttgagacagggtcttgctttgtcatccaggctgcagtgcagtggagtggtcacaactcactgcaacttcagcctcctgggctcaagcaagcctcccacctcagtagcctcccactcctgattagctgggactacagtgatgtgtcgccatgcccagcctagtggtatttttaacagataaataagaatggaggtagtggcagaggtggagtgagaagagagacaagtaaaatatagaaatttgagggaagtgaaatggccctttctgtatttttttaaaaatatggaggtttgcatcttcttgatttgcagctttgaaaacattgacttttttgtgcgtcatatgacactaataacagaaactaccccaccaaaataccaccacaaacttcacttaaaataaactccaaagaagaatccatttttcgtgtgatatgaatgacaaatgattataaggaattttaataatttatataaaaatccaaagagtcatattgtaagtactgacaggtatactagggagtttttgatcacacttaaaaattacttgtgtaattaggtacaacattaaaatgagaacagggatatatacagtaagtcctcacctaatgtcattgataggttcttggaaacttgactttaagggaaatgactactctataatgaaacaaattttatcccagcttaaatgatataaatgagagtcattttgcttgacatcactgtttacaagaacctatcagtgattttaggtgtggacttattgtgtgcataattcatatattatttaacaatatattaggtccaaagatatatctctggctttcttattctacagatggttaatgtctgctagctaagctaggtaagttaggaaaagcttagaagctcaatacatgtaagcaaataaaaaacccaaaaacatcattttagacgattctttaaccttctattctaaaattatggcaggcactatacgtaagggctttatagtttacattttgtagacgaagaatataacaatcaagaaacagtctaaaaaactggcaatggaagaaagaatgaagagaaacccaagacttagctaattcatgatgttgcctcaaatatcaagaagctggtattatgcaaatggatcttgtgagaggaaatgaactcagaactgagattatgactgtgacgtactttgagacactttcagaaagattgaaagacgaaaagatatttcttggtacaaagcacattatgattgatgactgtttgagggcagttatctttaaactagtattacagacaaaaatcccatcacttgtgtgatgtcctccattgtgttgtagattttattagcctcatggttttatgtgagcaaagaatgatctcaacatgacacaattttaatatattttctcccaagctctcagagctatttttgtctattaattttaacataacagagactgcagttcccttatattttgctgttctaagggagaattatgtcttttattttaagccaggtagagggaaagcatttttgttgttaaaataagtgaggatgattatttttcccattcagattttcaaatcccttggcgaagaaggtattgcattattaaaatttacttgtttgatttagaggtactgcttttggacatggtaagagttttgaactttaattttgatttatttgcttgctagagtgatagctatgaagaattcataacattttattttaaatggaaattgctaacagaaataactgcactttataatcgttttgagataattttggttgcaatttcacatttgactaacagcattagagatatgattccaattaagggaagtagtaaatattttcctttgaaatttctaagaaaggagagcctttctgtgaattaatgcataggttgatatatgcagaaaaccaagcactctccatagcacaagaatgttgaattagctaggaatttgcactgaattagctaggaattttatacacctgtcaacattctcccctttccttataattttctgtctatttccagatcttcattcctcatgattctatcacaggacgtgttagaggagcacacatcactatggcttatgacatttcagaaaacataacttaaaaattcctttgcagaactttattacagaaaaattgatcacatgtagtaaggaataataggatacacaaaaagtaccacatagaacagtacaattttagaaaggggagagaaagaaggagaatatgtatccttccagatgtagatccccagatgataacagggctatttctgggtggtatgattacaactggtttctattttcttccttttgttgattcattccctctaatttttatatgattaacatgtattaattgtgtaattttttttcaacttagaacaactgaattagggtggatgttttaaatcccatctccatagtacaatcaacacactagatatcaaaggctcttttttggaacaggagggcagactgctattaaatattattccagggatatgcaaatgtttaagaggctcaggtgggcatggaacaagtgtgctgggagggtatcaccaatggaatagccattaagggcctaggcagcacttaacttgagtcacaatagcactgggtctggataatagccattgtggctgaaacgccgcttagagttgtactctgtgccaaattcactttacccacagaaattgcaaatgagttatcattctcattttttccttttatttctagttgccacatcattgtacatatttatgtgatacagagtgatattttgatacatgtatacaaattatgatacatgccatgatcaaatcaaagtacttagattgttgaagggcaggcagaagactacatgatataatttgatgggcttttaaaatgttcccttacccccaagtttctctcaatcggctggccctagggttttcaattacctctgtcttcctttgggttaaatcactgtattttgagaaaatgtctttgaaaatacttgcgttacatggtcaagaccaccattctacagattacttgctaaagaccaaatctctgaagaaatgagcataaagtaagaatattgacagaggaagggagacagagaatcgtttggattgttgatcactatcagtagcaataggtgatgaagtcaaagtggagggttttttcaccaggactcagtgtgaaaatcctaagtatttgatgtgaatttgtgaaggaaggcactgaaatagggaaagaaaaattttaaagcttgctctgtacagttaaaccttgtggcatatttaacaaatatgttttcaataactccaatgatctcttggtatgttggaatgcataattttgccaaatttgcataaagttcatggtaaagtgatgataggagactttggttaggtagtaggtgcatctatccagccactcagcatctctttctcagcagggctcttttgtgtgttcttggtactactaagtctagagtaacatggagaattgtcctacaatattcttagcagtgaaactttaggcaattaatttgtaatgtcagaaagttcccagcgtgcatgtaacactagaaggaaatgtgatttcagaatgagccagatgcatttataaatatttcaagattgtaaatttcttgaagtttccagagtaataaagaatatcaagaactgactctttgggaattcaagttgttataaagctaattgaatatgtgaaggcatgttcagtgtttgagttctttttctcttttttttcccttccccttctttcctttctctttctgtcatttctccctcttttctttactttacctctctccatccctctttctttttctttcttttttttacattctccccttcctttcttcctaccttccttccttccttccatttttttttctttttctgccttttgagtatttatagtgatataatcaagcagctcagggaatttggctgcaataaaggctgttttggtgactccctgcttctcttttcttctctcaaacatagttttgagaagaggagatatagtgctagtagcagcactcaagagacacttgattaaacttgaaattttataagcattccaatgctattacattaaatgtatataaatactgacttggccagttttgccaagagtgaattaataagcattcatatgtgctaagttataagagagtctaatcagttctgcattctaacattgccttttgcttctactcctgttacagtccaaagagaatatttaaaagattccatgtttatattcttatttcttgatattagaccactacttattttgttagcattctgtcttcacagtctgtctcattcattcattatacccttttcctggcctggtatcattaaccttgctttgtaaataaagagagacacagaggtcagccttcttggcgagtgttttgtctacttattgctattgctgatattagataaaaatattgaaaaaatgcagcttcatttccttgtttaccttacctgaagttaggtctcaattatgcaccaggggattctatgctgcagtgaaactgctttgttgggtaggatgtgaccagggaatgcagactaactttcaattttctgtgaaaaaataataataaagatggtcagtgtgttgccaaactatagggatatgtgtgtttttacttatcactctgtacatgtgtatccacatttacataaccatgtttgagttttcatgccactactaccttgagtcttccttaatatataggattcagagggtttttttttcaatcattatctccattactttcacatagccaatttcaataattatagtcatgttttaagttttgcgcacattttcttttagccagaaaagctccattttaaatgctagcaaatccagtaactcaaaagctttcaaatatagtctattgtccagggctttcgtggtgcatttcaacaaagagaatctctatgctcactcaatttgcaaacatctggaggaaaataatgtgataattagaaggcaccatgggttcatcaaaaacaaatcatgccaaactaacttaatttctttctttgattccttaacaagctgagtgggaacacagagggtatttttattatagtaagacacttgatgtagctttctaacaatcttaaaaggcttagggaaaatgcagattagggaaaatgactggttaatgtaggatatctttgtaaaaagggaccagcaaccattatctatctatggttcagaatacagttagtagaggctgttggataaattttattttatttattgtatcattcaatatcttaagcctttgactttgattatctatattttatatctcatagtgttttttaaggtaactggctatagggattttatttttaactaataacattggtaatttttttctagaaaggaacatatatcttggccatcttttttcattaaaaatctatgaaaatcatacacacacatatacatataaatcacatatagactgaacacacgtgtatatataattcataaaattatatcataaatcataatcttagtttcaacgactaatattgttttaataactgttcttatggttttgtgtctgtccataatgtttttataaaagtgagagtatactaagtttactatttctgatttgttttactttaatagtatagtgttaaacacagtcctaagttgataaatgtacttttacagatttatttataattattgcatagtatttccgtggatgtgccataatttattgactcgtctccctttgttagatagattatatctttgttgttgtttttacaactataaaatataatggaatagctatacttgtagttaaaactgttttcttatacggcatatacctagacattgtattattgggtaaaaaatgcaaacattgtaagaattttatgtgtgctctctaaatgccttccaaaaggttgaaccagtttacattcctactggctgtttaagagaggatgctatatatatgtattcatatctatagacatatatgtctgtatgtgtatatatatgtagatatatgtatatgtctatagattttatgcatatgtctatagatatggatacatatatatacatacacgtttagaaatagacatacatgtgcacatataggtgtatatgtcacatacacatacacatttagagatagagacatatccatatacatatatgtaggtatgtatatgtctatagtttccatttggaaaaaggaaagttcctctttgggaaaaatgaaactcactggaaagatttaaatgataaaagttgccataaatattttagaaactctatgtttgattatgcagctgtgatgaaagaatatcaaaatataggcttaaattgacttttctcctacttctctgtaaagatttatcaaaaggagagattcattttgtggcagttattgttcttattgaacatcctgaaataagaattattctatgcctcaaagtaacactaaattatattctttgttaatatattaaacaagcaaaggtcttttaaatggtgtttgagattaaagattctgttttgtattttaattctgcagcaaatacagcttcctagcttctactgttagttggctctgatttctaattctcatctcttctttctttttacttgttgtgcctcattacaatttcaaatgaaactgtatgacgctgattggaattgtttctattgggggaaaatgtacgaattagatgtgcccaggaattcatctgcatttgagccctgctatttgtttgacacaatgggttttcaggaatgggattgcgggagctaaatctttaataaaattgttattgactgtccctgcaggaggcagtgcgcatggtggctaaacatgaggattcaaaccctcagctctgtagcttattggctatgtaattaacctctctgagtacatttactcatctgaaaaatgtaatgatacaaacctcttaaggttgttgagaggattcgatgggataatttaaatgagtacaggggacttagtaagctttcaatagatgttaggtgttactgctatctcttggtgatccacacttccctcagatgggagggcataatctttcctatagctattgcaaaaataatctgactctgcttgtcccatattattgcctcattttggaacaattatatcagaatctgtaaaataactattatgtcaatattttcctgcctgtctcccttccctctttccttctttccctttccttgcatttattgagaaccaaaggtattctatgctttgctaaagattggagaaggaaaactgataagaatcatattttgaagaaggtaacacaccagtggagaagacagatgttaatcaggtaatcacataaataaatgtaaaattgcaaggatgacaagtgctacataaatgacagctgcatgggttataagagcatataggagattggaaagacttctcagaaaatgaaacagggaaataaagtataagaggtaaacaggtgaagcagtagacttctacatagtctccctatttttgccgttatcttcttaaagcttattctccgcatagcagccagagtgaccacattaaaatgaaagatagattatattagatctctgctcaaatccctctcatcatgacttcattacatctcactcagaataaatctcgtagttcttattttgttttatagacccctatgtgattggtctcctgctacctttctgacctcatgatctttcactctcttcttacacagtcacgttcaaccacactggcctccttgctgttcttgctgttccttgaacatataggtaaacttcattttgaagtcttttgatcttgttctctgcccaaacactttccccaggtaccccctcaccatatcagtgagctcttccctgatgaccctatagaaaatagcaactctgtctctatcaggactcctcattgcccttatgctgtatttatcaccatcccacattttataaatttacttgtttattttttgttctccctcgtcatctcgactcaacttgttaaaaacatcatgggatcaggaggttatgtttactgctgaaatcccaactccaagtatagtgccttgaaggtactaggaactcatttaatatttgaggaatgaattaaggaagaagagacatggtggtaagagcatttaggacagagagcgaagcatatgtaagggccccaaggcaggtagaagcatggcagccaggggggactgagggaaagacattgttgcttttgaacacagtgaactaaaaaaaagtgtggaatactagaggcaaaaaaggtaggtaaagactggatcatacagttataaagattttcccctaaaaacaaatacaagctactgaagtattttaagttgagatggggttgaaggaccagatcaagtttatgttaaaaaaaaaaaaaaccactctggctgaagtatggatatcagatttgaggggaggacagtgtgaatgtgagtagatcaattaggagttcgttatagtagttgtgccaagagatggtgccagcttgggccactggcttcagtggataagaaaggagcggattgtttgagagcagtggttctcaactggagcagtatttgacaatgtttggaaatactttttgtcattacaattgttgggggaaaggggatgtctactggcatctattgagtagaggccagggatgctggaaaccatcctacaatgcgcagaacactctccaattatccagtcccaatgtcaatggtgttgagattgagaaactttgttttagaggtaaactcaagaactctcttcatgaggtacaaactcagaacttgctgttggagtagacatgggagttgagaaagtgggtatttcctataaaagaaaggaaatcagtatatcaaagagatatttgcactcctatgtttgttgcatcactgtttacaatagctaagatttggatgcaacctaagtgtccatcaacagatgaatgaataaagaaaatgtgatatatatatacaatggagtactattcagccataaaaaagaaggagatccagtcatatgcaacaacacaggtggaactggagatcgttacattaagtgaaataagccaggcacagaaagacaaaccttgcatgttctcatttatttgtgggatctaaaaatcaaaacaattgaactagtggacatagagagtagaatggatcagaggctgggaaagatagtggggagattgggggaacatagcagaggtacaaaaaatagaaagaacaaataaaacctactatttgatagaacaacagggtgactatagtcaataataacgtaattgtacgttttaaaacaacttaaagagtataatgggattgtttgtaatttaaaggataaatgcttgaggggatgggtaccccattctcaatgatatgcttatttcacattgcatgcttgtgttaaaatatctcatgtactcccataaatatatacacctatgtacccacgacaattaaagtttttaaaaagcaagtgggtacatctcatgtaacccaaaatatatacatctattatgtacccacaaaagttaaaaattttttaaaagtaaattaaaaaaacttccagatttggggcatgggtaactaaactgatgagtgtcactcgccgcagggttcttctgcccataaggaattatgatttctgtccaacctacatcttttctttgatgttaacaacactaaccaaaagggtagaatggatactcatgtttgtactttatgatctgggcattttgggatctattttatggtattagcatggaggttaggaaatacaacatttaatttgatattttcactcaattatctgatgccactgattcatctgactgtattcatacagctgacatctgtggcactaattctcagagctggcttcatcaaaatagccattgaatgcatcttttagggagcatcaacactgtgctaagaaaatcttggatgtttagccaatgagcgtaaaggtaattaaatattttattaactttgtatataagagctcaaagcactttcacatacatttttccttcatactctttatgtgcttgtattggcagaaagaggacaaagtagctgtattgcattatagcacaaactttcaggcaatgagacattcctgaggcttaaatttcacttgcaaactaggagaagaggtggaaaaaaggaatcagaatttacccttttgctaatgcattgtttccttagaaatgtaatcactgcatcattctttcattttgagagccttctgagattatacaagatatttaatccaatatctttatatgttgaatctgcataagaagaactggagaatgtgtgttcttttttattttatttgtttgaatgtatgctaaacacactctacagaattcaaggaatgctaattatgtgtgctgcaattgaagttatctggacccagtttttttctcttttgctgctgcatttttcatggcaagaatctggtagaagatgaaaattataaaattgaaatcttttcagtttgtgtgttactatttttaagcaggaaaagtttagtatgtacaaaagagatggtttcagtgaattcctgtgacattaatgtgctattttctctctctaagaaggaagttgagaacttgagcttgattttaggattatgtctgccctggtacccttggcgaacgtttctgcttttgccatgtgttcctggcatagttttgaggtggcgtgcattttgaaggggcactgatttgtgtttgaaagaaattaggtcctctgtaatagtcagcaatccctgtcttatctccttggttcagattggcctctaatcttctattacctccagttaacttctgcagtctgcttctattctcttgttaacatttgttgctgcatctgggatgaagcttataattatgtgtccattgccaactctttactagagttttggttaatccaggtcttattttgtttatgtttgcttaagcaaatgatgttcaatgctctttcagatatcctttaaagtaatgggatcaataatttaagcctttataagtatgcatatcctggctaacctcattttacccatgtgtctgtactgtcagttatatttacattgagcaacctcactgactcttgtggatttatttaactatgaagcaaaataatagttataaattcagtatgagaaagtattacagatatcatgtcttatcttattctccagcgtattttttaagtgggaaactgagtcccagagaaaaggaataattctctgcatttgtaataacactctgtagtttacaaaatatactaataccattatttcatatgatgttttcagtaattctgtgaggtgtgctaggaaggcattattatctctattttacaacaaggaagaaaagatgtagagaaattgagacttgcttcctcaactacctacaacaagtatgtggtaaatctggatctaaaatccaagacttaaggctgttaaccaagtgtcctttcccaaatatgatcttggctcatgagcagagtttttccatccacgtactgctgtgctgtaatgtgttgagatactgactctctcagcacttagagctgccagagtagccgttgacctctagtcacaaggatccttctcacctcagtgcaacacagaactactattatcttctgtgtacctcgacattgaaaaaacacagaagcacagttctaacatataatggaaaaagacctgattaagtcactcagtgagtttattgaaagattactaggtgcctaacagtcctgggaatgttttcacagtctgcattcatccacctctgatactcatatatatttacctccaaggaacctccccttcctaccgacagtttgtgtggttccaggaagccagctgacaacaattctgacccaggttaaagatgtgggcctcagtaagcctctgtgctgcctcttcttgtcatggtgattagttcaaggggaattatggaattcacccagagccaaccagatctcatgagactgtgacttttgggcaaaagaatattgctactgttctgtaacagactctggaagcatgcaggctgaggctgctgccaccagcctgactcctcatgtagcttaagattgaagccaatgctggaattaaggagatctgagagagaaactgagccccgctgataccatttgatgtcaagctgacaaaaaagctgaagctaattctacgctttagaattatacgaaccaatacatttctcctttccttaaaatgattagatgaagttaccgtcactaaaaatcatctgtattctttcataaatggttaaaaattctaatttgtcactttaaaggcctcatggggacaaggacgatttagaaatggatgttccaatttgatctgatctcttccaggttgtatgtttttcttctccctttgaaaaggtaattcataacctatgaataaaaacgctctctctataaactttcacacaatctaaaggtgtttttgtcatagtcagttgcctatattaattcatcaaataattattgttatgacactgaggtaggctggggaagaagacatcatctttgctgtcaaaaaatttataatttagttggtagaaaaaacatgttataatggaaagaaaattaaatttaattaatgtatataactaaatctgatgtgagtgtcactggagtaggtcaaaagaggacaaggtgccatagattcaaaagtgatagtcaccatgaaagagagaactggagtcaaatctttaggatttgggcaggtgaccaggaagaagtctgtccaggagctgcagcatagcacagacaaagactcagacaggaaagaatggtgtttgaggaaggtagtgactcaacaagatgggttgcagcagaggagttagggtgagcaacaggatagcttggaaatttccatctttgacttttgagaagaactttgggacaaagctctttgcttaagattggtattgagaaacaataacatgctagccactcttttttttttttttgaggtgaagtttcactcttgttgcccaggctggagtgtgatggcacgatcttggctcactgcaacctccacctcctgggttcaagcgattctcttgcctcagcctcccgagtagctgggattacaggcgtctggcaccacgccggctaatttttgtattttagtagagacagggtttcaccatgttgacaaggctagtctcaaactcctgacctcaggtgatccacctgccttggcctcccaaggtgctgggattcaactctttattgagcacttactacatacatgacattaggttaaaacttcacatgcattatctcacttaataataataactttcaggtaggtattattgtacctaccaaccaaccctgtaagtggatgaggcagaatgaaccaaggacagtctgcctctgaagaccgtgcagttgctctggccatgaaattccatctgtctaagatgaacagagcagtcactttgcacatgtcatgtaagtttataatggtcctctgcacatttcggtgagtattggtatttttggcaagtttaatattcggagttactactagcaaattcttagaattactagatttcaggcatttagaaagcctctattttaccatgaaattcattgttatttattctacacttaaagcaagggagtgaaatctcataaattagattgaagtaataattattaagaacatcacaacttctagggattgaattaaagtatttgcattattatttcatttttccccaacagattgtgaatgaggatgttgttattccctttgtatagacaataagactgcgatcaaaagtatttaagtagcttatacaagggcatataattagtgtgagcagagctgtgacttgaattcaggtccttcaattataagtctagttctttcccaactacattagtctataagtggccaaaaagtacatatgaaacttggcattttatatgtattggagttacattagaccttaagtggccatagagtaacaaatgagacttggcatttgtgtttactactagtgagtgtgaaaagcctaagtaattatcaaatacgagggataatttgacaaagttaagtctcattcaaactgaaagtttgaattttccatttgtctggttattctatgatttgtcaacaagtcaggataacaaatatttattgaataccaatttattaggtaaaagtatatgctaatgtaaaaagaactttgtgcaaacgctacactaatggaatagaaaatatggttgaggacaaggcgaaaacctatacagtacaagtgcgagtaatctctgagaaacgattaaatgaatattttgaggtgggacataactaatatatcataggaatattaaggactatgagtgcagaggaagaaaatatttgtagctgctggagtggtcttgggaaatgttaacatgaaatttattgttattaatgaaggaagtatttgaactactccttgaggggaggacttggagaaatcagaaagagcaaaagcagagtggtaaggaagtatgtggtgtgctccagggagcagtttgtccagaaccaatatttaaatacagggtaaaatcacagaagtgggtcagggccagcttgaggaagtcttaaagaaaaactaagaggcctgaatttaatgatgcaggagggattgcagtgcagggctctgcaggtgcagaggagtggagacagggaagactctgggagacgaattaaaacaggagaagagtagagacaaaggttcatttgttatagaaaatactggggaaattggatgaaataactaacacaaactacaaagtgattggaacaggtcaggtccccacaagttaaagggggaagaataaatagataaatggcatttcaagtaaacaatcagacaaatttaatttatctgacattctgtaacacaaagtaaactgtcatgaaaactaaatacttgagagaaaaattaaaaagataaaagaaacagagtaattaactacaaacacaacttgtaaactgtgatcgaatcatagttaacaaacaaaaaaccaaaagctgggggactagcagagagatttgaatatagactggattttaggtaatattaatgaactgtcaatttttagttttgataataattttgtggtatagtaagaaaaagttcttatttttaagagatatatactgagaagtctcatatgtgccttttattgtcaatttttttctgcaaaatatatgtatatgcatatgtgtatttttatttgtattctatctgtatctatatttacatgtaaaccttttctatggctttgtatgtatttatatctacattcatactcagacccatactcatagtcaccccatccctatctctgtatatgtagctagatccagatatggatctagaagaagtatatgtgacataatgttaaaaaatttttgaatctagtttatggatgtacagatgagcaacgtgctattcttataattttttggtgtgttcaagatttttataataataattgagctagagggaagggggataaataggtcaggacttggagcctaaaggagaagcagtgtgagtggaaaggaggagcagatgtgcagtgataattggtagcacagggtgagttttttaacccaaagcatcagaggagcctcttaggtatgagttttggcattaaggccttactgattggctgtggccacattttgaataagggcaggaatgtctttagagaaagtaagtttgagggagagaatgtacttgttttcagatgggttttgtttccagtgaatatgagctttccaattgaaccttgttggaggaaggttgtccagactctgagaagatcagagctagagatgccaattccatagtcagacacagcagatggcagtcgaaatcatgaaattggatgaaaattatgagtaaagaagtgtgcaaaaggaaaactgagaaaaaccctaagaaatgcccatatttaggtggtggaaagaaaaagtgaggagagcaaagcagacaaagcaggccaaaccagaagggaaaagatagtgtcatgtggagaagtggagggagcacacagcccatggtgaacacaccatgcatctttttgaatgaatgaatgaatggagttgtacaaaagagtgagggtcattaaagtaaagataaagagaacagtaaagacaattgcagagtgaatgaaaggcatttgggattaggagttgagaggttattttaaactcagactaaaggtttggtggaggctgttgcaatggttcattgtggaagcaaaagccagcacgagaaagtggggaagctgagtagtagagggctcctcagtgcagtttggggataggaagacctggattcaagtcatgactcttaactctataactgccttccctgggcttcagttgtctatttccctaaaaaagtggggtaggctaagtgatgtccaacatttcttaaagcactcacattccactggcccttcagctgttttaaaatatatatttagagaagactgtcccaatccatattgtagtgtcattttcagcttcctatgtgtcacagttgctttgactatagagtccctatgtagaaatagaattatcctattctttttttggcaacctcactgatttacaatgaaattattggaatggtcaatagatacatccatatagcattttgacataagcaaaatgtaacttgactgaatagtaaaataatactgtaattttttatttccaatttcaaagattattttaaagaactgaggagatgatatattatgttgctatgcattggcaatttctggtaggaagttagggggaagatcaactcaaattctgaaactttactccattataaacttttctacatcctattagttccaaatatgcagaaagggattgtgcagatgataccattctgcttaaatgacaaacctggaatgatgaatgcttttcctggtcaattaacccctgccaaagctctcagtgactaaaagaaatgctgtggaacacagtctcaagtagactataaaatatacaattagaggtcttctgaagaggatagtgttccattagaaatctaccagctccttttaactctatgggtccctatttctcagaacttttaccagaggtttgttcagaaactggctcatcaccagttttcttaacaaagctttcagatctttgttatcacacaaagagataaagagtctgaaatcctccttatgattcaggcatcatctgttatcctagatcaatgtcaagctaaagatttttggaaaggattttggcaaagtgtaattgtagattaaccccacagccttccattagataaatggcataatgggaagtttcaaacaatgagtcagaggactgggctctgatcttgagaaagctgattttctctatgaccttcaattagttatataatctttttgtctgtgaatcttttatctaatctgtgatatatggtaactacttttttgtttgttggttgaggactataggaaatacaagatgttattttttctcatatgttgggaagacccattctttctgcatttcttctaagggacctctttctccttaagcacgtggacttcactggcaaacaaaggatgtatttaacctgatgaggaaagtcaattctgaaaaaaaaaagaacattttaataaggaaagtgctggtagtgacctcatattgagtgtaatgaagcatggttggatatacatcataaattatgcatctttgggccttagtctattccaaactgcaactttgttgaacctcatggactataattctgatgtgtcagtgggatatactcattgtcatgcagtttactttttttttttttttggcaacttcaaatacttaccttactccagatctaactttctgctgagggtagcttgccacccaccttggattccattactttctcactgccatgagggactcctttccaagcacttgaattttcattttttttcttttaaattactccttacaatgactgataagagataggattcattagcacactttgctagtactttgtgctaatattacactgaagtcaggtcatatgaaatcaaagtgttctttaattgtccattttgcacattcaacatgttgcatatggcccttcaggatctggtccttgataatgtcttctactatttttaaggcatatttcactctgattttatgccttaataacagtaaagtagtaatttctcccatgcgatgtggtgtttatcacctgcaagccattatccatgcttctcttattcttgggacactttttctgggcactctgcctacttaccttctattcttcctatacacctctgctcagactccctctttaccagggtctttttcctgacatcctcattcctttaagcataaggacaaagagcctctctgggtgttctttgaatatcctgtgaacgcctctgactttatgcccccaccttgtttatatttctgtttatgtctattatattaattagacaatgatattctgcagatcattccaatacccagcccagtgcttggcacacagtaaatggctaatatacatttaagtgaattggcctacttggaagaagaaaaagattcagattagtggccatttttatgtatatttgatgtccagcaactattatttacatacctgggaactcatgcatgacctcgggcaaggtaacaagggaatgctcattcggtaaatgaggcagaataaaaaactacttgttagtctagaaattaaggccatatatagataggcaagtctatatgggaggagaaaagaactcaggggaaataggtaatgaaataagcctcttaaatatgcaatgttcttcagttaatatctcatataaaacaaagaaaagacttccaagccttcaatattctaagttgccatggcagcagcaccatcactcttggctctttgagtagtaggatcgcagggggagaaaggcctgacactagtaggcagaatgccaaggggctgggagaggttactgaagcattttattactgacactgaagaaatgattatagatcatgaagcaggagaacctaccataccgtggcaatgagattcattggtttccagagagttgcattttgacttttaaaaggagattttaaaaaatgatagtcaaattgcacttcaatggattaaaaaaaataaccattttaaaagcagaagggtagaagctgctagagagtgtattcaaatccatgcttcttagcaaccagaccagatttcatccataaaagaaagccagaggtacaataaaaaaagcctctttggttctctagagaatataaaggcatattagaaaaaaagaagcactttgagatctgtggataaaaggcactatatgggcataaagtatattacaaaaagagaaggacaaggaagaagtgatgtctagactgggcaggttatcttgggtacgtatgagaataattgccaaagtcaaaatgagagatcatgacaactagaatcattagagtgttcagaagttagtattattttaaaacataacagatatatattttttcctgaatcaaagcaaaataaatgtaaagggaaaatagagaatatgtggattacttagtaactacatactatttcctcaaaagattttcacagtgaagagaaatgaaaaagtgcaaagaaaaaacgtcactaacatgttacagagtttgatgttatctatcttcgaagtttcagtgaaattctacacagtaattgattctttctgattcagccaagtaggaaacattagaacattttatgcataggtgtttttttttttttttagataatgtatggttagaagagtcatcacaaacaaaaaagcaaaaaccaaactaaaccaaaaacccaaacccaacaacaatcaaacatttaagaggaaagtcagggacaagaatgtagtttctggtgataggataagaaaaattacaagttaaactagaactctcattttctctaaattaagccagccctttttgtgtatgtataaaaaaaaaagaactggggggtatgaaagaaatgattcttttcatgtactataatcaatgcagagattatcttcaggaagattcaacaatgttcttgagtggtatacaaaaagcctgatgtatttgaaagaaaataaatataaatgaatgttttctggataaatgaagaagcaaagcttggaagtagaatgtgtaaatttagcagagatttgacgcgtatgtttgaacagacggtggtgcagttgttctcgtccgaggttattttatgaaagctgcattttcccttgaagccagaccccgtatggggttgagatgacgaaagcctcatgtatctcactatcattaggctaatgagattggtcaaggccacaggcattctagatcttggcaaaatttaagataaatctagtaaattcttctaatagctttgtgctgtttttggaaagaaggagaaagataagaaatgaataaaaacaaattttcgaatacaaaagattccatttctgaaatactgttccattatgaaaatgattgatattaagatagattatttacccccattgttataaaattttatggtcacagaaataatttaaaccaggtatttgtaaaaaatccaatatgtaaacacaaatattaggaacatttgttttttaagcattccctttgtacccaaaactttccagtttttatagtgaagagttttgaaaattatggtggatggacattgaaaatgggttagtttagctgtgaaaaagtttatttttgagctgagaccaactgttggaaattatagacaatttgtaactactaagaaaagtgaattggtgggagccataatgaatgctttctgataggaggcttataatgacttacatgcagttgggggagatatttcatttaaaatctttgggcaggttttcatagctagttaaaaataatgcaaactgattttaagtttggtgtgttaatattacaagctgttatgtatataagtcatcgagattactaaaattgctctttatattggtaggaaataactccatagtattgtctgtaaagtagaggccactgggtgaaaaatgctttgattgctgtccaaacgctgaagttataatacagtgcagagcaacgcccaataataaatggaagtaccatctgcagtatattacaaatgagtcactttaaagccttgtgtgggactttttaaaacacagttgtagctgcacaaagtaaagtggggagtttagaaattgcctggtgcttttatcagctcaagcagctactatagataatttaggtcctacaaccttttgcctctgtgagaattagatattcttggcctgaatagcttatatatagctttaagttcatatatctcttgatttggttgtactgtgctaaagaggccaagatgggtggattggtgaacattttactcccccacatttcacccttgggtcttaagaaaaaagcatactattaattttgccagaataacttctgttgtaaggcatactgatggttgttcagacgcatcacgttgacataatactatgataatagatgccatcagagggtgacattctagttctgggtcctgtgcttcattaagagacttcacctggaaagtttttcctactaagacatgttctaagatataataattaaattattattgaatttaattcaatccaatactgaaaaactaattgaagaattaaaactgtacagtgttttataatgtctcactattctcaagatatttaatgatacattttatgtccaggattggatattgtttcaggtgcaatgcttcctcatgggagctcccaagttgcaatacattcccaccagtgctccccatgctgaccaaaggaaaacaacagcaaagattttgaggaagtaatgcaaacagaactaaagacagttggcataacatttataaaaatgttctacaagcatatacgtaataaaatccatcattcaacattctaagttgtcattttacgaggaaaagaaacatgcccaatgtaattaaaactactgaacttttatgtcttgagtttttcagttctcttgttgcctttgatactactgagccaaagtcaaactattgaagattatgcataatttgacttcactttattgtttgaaattacaaatgctgggttttttctccttttttaacttttaacctttaagttcaggggtataagttcaggtttgttaaataaataaacttgtgtcatgggagtttgttgtacaggatatttcatcaccaggcattaagcctagtacccatcagttatttttcctgatcctctccctcctttcaccctccaccctctgaaaggcctcagtatgtgttgttcccctctatgtgttcatgtgttctcatcatctagttcccacttataagtgagaacatgtggtatttggttttctgttcctgtgttagtttgctaaggataatggcctctagtgccatgtatgtccctgcaaaggacatgacctcattcttcttttatggctgcatagtattctatggtttatatgtaccacattttctttatccagtctatcattgatgggcatttaggttaattccatagttttgttatcatgaatagtgctgtaataaacatacatgtgcatgcgtctttataatagaatgaaaattaactcaagatggattaaagacttaaatgtaaaatcccaagctgtaaaaacctggaagacatcctaggcaataccattcaggacatagggatcgggaaagatttcatgatgaagatgccaaaagcaatggcaacaaaatcaaaaattgacaaatggaatctaattaaactaaagagctgcacagcaaaataaactatcagcagagtaaacagataaccttcagaatgggggaaattttttgtaaactatgcatccaacaaaggtctaatatccagcatctataaggtttttttttctagtatggtgctaataataggattagcacttttcaacttttatttttgacagctttgttgatttgttttattcttagtatgtccacgaaatgaccacttaaaggattttaacagttttcggtcaccacaatgttgatagcacttgcaggtgctgtggtcaacatccagaaagccatggattattggatattccaggtgtcaatccatttaattctattctattctttaatttctaacattctcttattagaagcaagttataccttagaagtgttgttaggacacagcactaaaaactataattccaatttccatgtgtctttattttatttcaaatgtatttgatcaagatgagtattacatttttgtaataataaatgtcctcagttttctggtctgaaggaggacaccattattcatgtgtaggttatagggtattctttactgtgcctgagatagctaaaatattgataaagatttagagattcctgtaagttcagctttgagaccttatgtctgccattcagggagcgtccatcagatggctgtggtaacttgaaaattgccatatacttccttttctctccaggggctgagtgtttactaataattaaaattttcttcctccaattaatttatttaaaataaatatattgaattaagaaaatcttatgatgactaaccaactaattttagcttgaagcaagattgaagatttaaaacatctcatggcttttccagcagtagttttctatcaatattttatacgttgattgcaatttacttctatattggcattcttgattccattgcttacctgtttacattcaagtagatgtataactttatgtctttggctctttttctctggtagcctcatttctgactacttcgagggttgcttggcagtggtgagtgggaaatcagtcactttaagggttatcctttgatttttctcacttatatgcttagcggctagtcttgtctatttcccaaatgcagcaactggcacagtgactggagcatggaatctgttcttatcgccttatgattcttctgaattagaaagcattctcctcaaagatggcagctgtgtggctagctttctccttgtaagttaatatactgttgccttaacttactctcaaatttcccctcccatgagaatttccgtggtgtagagctgtaattgtaaagtagggcttctaaggcccctagaaatattgtagtttgttagaagattttgaatatatctttctagaattttattgaaccacagtctacttagatgagcattctaataatcaagtacctagtgaaaaggaaacatgacaaatatatttttggggcagattatttactgctctgtgcattattacatcacttcagccacaagagtatggatgattctttttcaaattgtaattaattcatgtgttgagaatgtgggaaactacttcatgaaattttacaaatattatcagtgatgcatccatgtgcttctacatgcaaccaaactcacataaaatcaattaataatgaagttaatacaaccataatgtatcattaaaataaaagtaacaggccgggcatggtggctcacgcctgtaatcccgtcactttgggaggatgaggcaggtggattacgaggtcaggagatggaggccatcctggctaacatggtgaaacactgtgtctactaaaaatacaaaaagccggatgtggtggcatgcgcctgtaatcccagctactcaggaggctgaggcaggggaatcacttgaacccaggaggcggagattgcagtgagccaagatcgtgccactgtagcctagagacagagcgagagtccatctcaaaaaagacatccttgttgatgatctcacaatagagtttccttctttagaattatgcggatgtgaaagcgcacacacattgtactacagtgttgcgtgacaaccgaatttctcagtagaatactgaatttcagcctcagtaagctctaatgatcttctaacattcatttataaaacccaaactttagaaacacttaacaaaccactcaacaggatgtttagtaacgtttaacaatttgcaaaaaataattgccaattacccagaagacctgaaaaaagaattcgtaatttttatacagcccatggttcatcaagctgaaccttgcatgagctgacaacaatgcatgtttgacagtctctcttgagttgaaccctctttttgtggatgacaaaactgaggtctgcggaaggaaggttcttgtcagttgtagtaaagttaaatatttttcaattttttgtgtgaagtatttgcttaagaatttgaagtccaggttatatgctgggccagtttccttatttatgaaaacacctttgcttaagagcatctgtaaatagagatttcttcctattatggggtcatttattccattatagggtaattctgattgtttgaaagttgagtctgatgtgaggctgaaatcgaatctgtctcatgacaatttctatttattttttcatttcctggtgatgtcgtttagctgtgtccccactcaaatctcatcttgaactgtagctcccataatccccacgtatcatgggagagacccggtggtacgtaattgaatcatgggggcgggttttcccatgctgttctcatgatagtgaatatctcatgagaactgatggtttcataaagggcggttcccctgcacatgttctcttgcctgcagccatgtaagaggtgcctatgctcctccttcaccttccaccatgattgtgaggtctccccagccatgtggaactgggagtccatttttacttagtaaatttaatttactttgtaaattaagtcttttactttgtaaattacctagtcttgggtatttcttcaaagcagtgtgaaaatagactaatacacctggataatgataaggtttgttttgttttgctatcatactcatctgagtgtttcaggcctatgatatggccagatttgcattaacttacaaagcaagaggtataaaattctttggagtgagttctttcttctgcagttatctgcatggtagagattgtccagaagagttttttttttttttttttttttttttttttccaaagagcagcctcacttcaccatgtgatttgctttgagatggaaatggcccaggaaatgatagggtttatatctatcttcttacttaataggaaagcatgcagatgtaaagaactcctctctgccccaaatctctgataatttccccaagaataagtattgagaactccagaattcagatgtttcaactccttcacaagacacttttaaagtacttgaataataatttctgtataactttctgctgtgtgtagaaatgactcttttgcttctcaccattgacatattactggaagtgcaaacaacatttgatgatgtagctataatactgggagttttgaacaatagctatctctaatcacatttgtcaaaagcagactagagatcttacctgtctgaagttgtcaacccgtaggccatttttctagaggcaacctaaagtgctgaataagatttgcaagtggaaaaaaatgctatgtcaccgaggtagaggtaagcttggagcccaagtactgtgcataattcttcaaaggttatgagaatgacagctattagcaggctgaaggcacaattctttaagaactaacacacagcagtctttgttgccttttgccctaaaatctcacatcacattctatttggttagacagctattgaactcaaaagaacttcagagtttctttcaagtttcttttcctacctttctctttttagtggtataaatgcattcaatctcttgggcaccctttgaattattttattaaattctgcaagatcttagtgattggtttctggtatttcctccattatcaagaccactgctaaatcttaagggcaatgttatgggtatagaaaaaagaaaataaagatgcatcaagatagatatgttagatagagaaccatcactcaattacctgccagaacgttggagagtgactgtgatgacaccgggtctaaaagcatttgaaatatttaaaaagaaatgtaataacagatcaaccccctatagaaatcgtattttattctactgaattgtttcttggaagcatttacgtctttaaccaatggaaagatgaaacagctttttttctttttttgacaattaaaaaagtttggtccaactgaatttagaatatatacacttggatagtttgcccatttgtttcagctaactggtagggtttttaaatgtgtactaattgtacctcctatttatagaaaaaaagtgctgttctttgagagagagaaagaatccaggaaatatgatgcttaaaggtaatgtctttcactacacccactgaaggtcactttatctatccaagggtaaagtttttctttctctcttttatttttattgaagttggactgcagcctgcatagactttctttttcctttaaagatatcgttttccgcctaattgtgcccagcttcatttataccctgaaaaggattgtgtttgtgcttacatactcaggagactctttcactcaatagccaaactccagcaacagccctctgggatatttgagtaaatgtaagtgaaagttccctgtgtttgtctctgtgttctttttaaacaaaagtttaactcagggcaccgtgggcatatttaaagaaatttatctgtagaactgtcttccagctaagatctgaaaaatacattttggcctgcaaaagtgttcatcagtcagcagaatttccagtaatgcctcttgtattttcaagccactttctccccatattaataggtaaaagaactagcagcacatgcctacagcccataatgatgtgcctttaaaactttctgtgagaacttagcaaaggattaaaaaggaaagggcaaaccaaggatagcaaattgattcaattccagtggaatgccaattccagtcatttagtgagtatggcatcccatgcaagctaaggggaatcatgaggatgcagtcagtaggaaagcatgctgtgattgatttgattttgccatgggcatgggaaggcaaatgatgacatacgttacacacgtattccacgtctggcttaatcttcaacatcaggtttgtatagtcctacaaattacctgtttgggtttctgagctacatcattcatattctgttaatttgggattcttacttccaaatgaatatgaagatttgtattggatttctttaactagtgaaatgttcaaatctgagcaataattgaaggttcagtaacaggccagctttgcttgcttggtcttccagttctagatctagggacattgctttgatatttatgaccataacctactttaagcagcctagcttcatctccttgagagccctgtgcatggtacaaaaatccttttgtgtacattttgtcctttttcttcctgggagcagaatcatggtactgcctatagacatgtggtcagcctttacacttaaatcaagaaaatggcaggacctttgtcttttgtacaactgtaaacatttgaatgtcccttacacttcatatttctcatcttgctcactgctgggactgactctttttttttttttgagagagagggcctggctttttaaaccagactggagttcagtggtgcaatcatggctcactgtagcctcgacctcctgggcacaagtgattctcctacaccagcttcttcagtagctgggaccacaggctcgtgccaccatgcctggctaatttaaaaaagtattttttagagatggggtttcagtatgttgcccaggctggtcttgaattcctgggctcaagcaatccactccgtcagcctcccaaagcgctggggattacaggtgtcagctaccgcacctggccaagagactgactcttatttcctgttctggtcagtgaggctgggctgtccctgattaacctgcttttacatgatctaattggccacactaacagctcctttttatttttagatgctgtgtttagatttttgttttgattcagaaataaattttaggctttgagctactttggcctttattaatttgtgcaatgaactcacaatacaatacatgctcttcagcttcattgaatttgttgtttacacagagattgatatttttcttacataagtggtttaagtcaggaaataaataacttattcaactgggtaaatatattaataagaaggactttggtgatacgatttaaagcaaatcaaagaaatttattttaaatgtgctcctggtttttaaaaacatgcactgaataagctgagcccatacctggaataggaatccaagtctagactatcaaattaaataaaacaaactcctccaaaaataaaaagtcagctaaagaaaattggagaattgaatataaaaatggatgtggtgcaggtggccattactttgaacagaaaaaactccagcttgtagcgacagagatgaagaacctggagaggagaatgctgatctactaaagcagatggtccaaacaaacacgagctaggaaaacaaagcagaaagtctgggagaagagccaacatctacaatggactaataaaagcgaacaaacacctcggcaaccacatccgacagctaggaacctgaattggcactgctcagctcattgttttgggcatatcagaaaaagcagagggaccaccagcccgtagatgctcccattcactgcgggccaacaaccactggggagaattagaatcctcctggtgccaggaaacctcttgaagtttgcatattaccacagctagtgctattctcattcaaatataccagtaaaccaaggaattgtgtaagatattatattaaaaagttgtaatccacagtagaaagctttaaagaaagagaatggtgagaacgaaggaatgccttatttaaggattgattgttgtatttttcataagtagttgtgtttttagttagataacaaacacttagaggggcttttaagagggagagagaagagcaaggaattcaaaaattcttttctttgtccatgcagtgctgtgcatattaatttggtgaatgattattgtgtttaatgtttcaatagtatgattttaacaatggatcctatagttaattctgtataataatttgtaatataacccatcttggctgcattattttttacccactgcactttactgctcgtattttacaatcacaacatagtggttacgatctttggggacagctagaccttggcttgaattacctacttcacttactctttgactattgagaggtttaagttccttgacctctccaaccctcagtttcctcaactccaagctgaagataataacatttaatgaaacatatattgaaactatgaaatgaaatgtataaaaagtgcttagtttttggcatagggcaagcagtcgattactggtagctatcaacttgtttttctgtcagtgccaaataaaattgataacagaattactaaaaaatcatataaactaataaggaaatctttaataaccaactaataatagaattagtattttgagacttctgaccttcctaataccacattatcaaacttcagatctgtctagaactattttaatttggaaaaaaaatagtctgatagctgcctctatatgggcaaatggagatacaaggaattctccagagaatgtgtagtcaaacagattttcacatcttgattccagacactacaaacaaaaggcatgaacatttactttagatagatacagccacattgtcctctaaaagagtacttatttacatagctaccatcggtgtaaaagaaaaaaaaaaggctgtttctctatatactttcaaatttttgccgatttgttggctgaaaagttgtaccttgttattttcattgacattttcttaattattagtgaggctgagcatctttttataagttattggctacttacctagtgatatggtttggctgtgtcccccacccaaatcttaacttgaattgtatctcccagaattcccacgtattgtgggagggacccagggggaggtggttgaatcatgggggtccatctttcccatgctgttctcatgattgtgaataagttctcatgagatctgatgggtttatcaggggtttccactttcacttcttcctcatttttcttttgccccggccatgtaagaagtgcctttcgccttcaccatgattctgaggcctgcctagtcatgtgaaactgtaagaccaattaaacgtctttttgttctcagtttcaggtatgttgttattagcagcatgaaaacgaactaataaacctagcttctgttaattggttgatcttatagtttgacaacttttctactcaattatttgtgtttttcttattgatttataggaactctatacatattttaattcataatgtatattgcaaatccatattcccatccactacctgccttttaatttttggttgttttactccataggaattattactatttatgtcagtgtacatctttttctgtaaggcctttgggcttcatatctaacttacgaagatttcaaattcaaagagaaatctgtattttaaatgcttctaaagttttaaaaaatgtttagtgatttatacaaaattgacttttaaaatattatatggggtggaaatcagaattaataattccattaatgttttctctgtaagaatattcagggtcctcatgtaatttttgagtactccatttttttcaccactgatttgaatattatatttattaagtattaaatatatatatagttttaaattcattttgcttgctttctttgatctagtcatacatttctgtatcctgtacttctttacttgtctttaaataagtaacataatcttaaaatgaattggctttattgtgtgttttaatatatagaaagtgctcactcattattttttatgtgatggtctcataattcttattcttttagataaaatttaaaattagcttatgaagttctatcagaaatcctggttgggcatggtagccacacctgtaatgttagcactttgggaggtcaaggcaggaggactgctatgagtccaggagtttgaaactagcctggacaacatagggagacctcatgactacaaaaagtaaaaatattagccagggtggtggcgagcctgtaatcccaatgactcatggggctggggctgttggatctcttgagtctgggagttcaaggctgcagtgagctgtcatcacaccactgcactccagccagagcaacagagcaagactgtctctaatataaataaataaaattaaataaaaatttaaaaagtgttatttatattaggctgaagtttcaattaactaaaagtttgtgaagctgtagcattttaattgcacagacttccatgtaagaacaaagttttcttgtctttaaaaatatttatttagttaagttttatcatattcttgatattgatctttaacactttcaataacatttattcctaagtattttataatttttaagaatggggacatttttattgttaattttaagctatcatccctaccaagtatttgtttattaattttcaaagtaatacctgtgcacagtttaatattaaataataaaaaagagttctccttggattgaaaaccctggtgtgcgggagcaagcttgtgtggatctcttcccaactctgtgttcagggatgacaaattgttatttttaaattggccatggtgggagtatttctactacagaaattggcatgtgctataaatctgaacttttttttttcctggagagcaaattttaaacatttatcagcctaacactgcaacaacactactccactccaattcccacccccagagacaacaattttcaacatttttagcagtctcttcagctatgtgtatctgtttctaaatatgctttgttggtttcctttttcttttttaaaaatttcattagccattgcttatggtatttacttcccaccttgagggatgagaatttccaccactcctctttctataatagtttctataatagttacatctcattttattcaggcacactattttgattatgtccatatttttcatgagttatatactataatttagttttcattcttatacaacctttttgtccttatttgagttaataattgcctaatttttcttagcttagttttctgtgaatatatcactaattatcctcttcactcaatgaatgtgtgaaacttctacaataaaatcaaatgccagggagtttacctataagcttcatttcttcccctttggagacattcctggagccctgcaccttcctattccattctgctctcgatgttactatggaagtgtcatccttgggctttccttcaccatcattttgggaattccttttacttctgttcactggaatttattttcctgggctatttctatatgttgaaccacccaattagcttccttaaaaagggtgttttgaagatcctttttacgggtactttgcaggactgaaagtatccttattcttgcatcatacttggttgatagttaaactgagtataatgttcaaattggaaatcatttttctctagtgattttaaagacattgctctgttgtcttacagattccaatgttgctgtaaaaaggtctgatgccattatcatttcgaatattttgtaggtggcctcttttgttctctctcaaagcttttaagactttctttttaaatcacaggtattcttaattcaaatgatatcccttagatgggcatgttttccttcatttggcagattttttgaggatgagggtgcttaagcagttccctctgagatttattaatttttaaaattggttaccaaaaatatataaaaaatactttatctttttaatgttgcctttttgaccatctgtctggattttgttattctaacattctaatttttttgttgattttcttggatattttacatgaatatcatcaataaataatgactttttatctattcgtccatattttcatattccttatttttcttgtcttatctaattgtccaagacatctaggtcaatggagaatagtaactgcaaacagcagatattctttcactttcactgactttaatgggaaagttcttaatgttttactatggatgtctgggcatatacttttttttttcctttttcttttcttatttttttgaaatggagtcttgctctgttgcccaggctggagtacagtggcccaatctcggttcaccacaacctccatctcctgggttcaagcgattctcctgcttcagcctcccaagtagctggaactacgggtgcacgccaccatgcctggctaattttcgtatttttagttgagacagggtttcactatgttggcctggctggtctcgaactcctgacttcatgatccacctgcctcagtctcccaaagtgctgggattacaagcatgagccaccatgcccggccaggcatacacttttataagtgaaggacacttgatttcattcccagctttatataattagtatgataaatagctggtacattttcgctattttatcttgacattaatttttaataatatatgtatatgtacatatatattcttatacatgtgtaattttgcattctttggaaaattgatttgaggctatgatgaattattttgttaagaaactgctgaattgttgctaatactttattaggaattttacatgaatattctcaaaataggtgttctaaagttaccttttaagtgcttttcttctgctttgatcaggttatgttagcctttagaaatgttctggctaatcttttgttaatatgacaatttgactgatttatttaaatctcacttgtctgaatatattgagatttttttattagcctaatacatgttcaggttttatagttattgcaaaggacatttgagataatatataatacgaacaagatttctctatatacctacttattgtaagcttactaattattgttatttaactgaacaaaactttttacttttaggttctttattactttattacttttgcatagaggtttattagagtacccttctatgattataatttttgacaatatcttccttcatatataaattttaactttaaattccatgttgcttagtgtataaaatttaaaactatgtggatttggccttctaccaatctaaatattcatattgtttcatttcatacttttgttcttattttagtattacatttttgctaatagtaatactgtagcacgtgctcatagagggctttctttggggttcatggacaacaacaggctgaaaatctttgctcttggattagagaaatgtggtgtgttccacagctgggcgttacacacttacatactacatagttatctccctgtcttttgaggaggtttgctttgcttttctttctggcctggatatctaggctaaaagccctctcatggaagagttttctttctttggaaagtaattcttaagactttaacctgggaagcaaatgtcagtgttcctagatgttttggttttggtctgggagaaggagggccaacactgacacagcagttgctgtttgactgatggtattttaattaattgtacccatgaatgtcctgctgtttgaatttgctgactctgagcttggagtttctctggagttcctttgggaagaaaggttctcaccttggcaatggctttctctcaggcctactttcggttgaagttttttcactgtagtttctctcagtttgatcgtctctttattctcttgtctagaaatccttctgtatttctggtttgttgatggcattttttcttcttgatgactgcagttattgttgaattcttattttagactatttttttttagccatattgggatttcagaaagaacattgtgctctgcctgctgtctcaagttgatagtgtcatgttttttaacagactaggactttttttgtgaatataaaatatctaatatctaaatataaaaaatataaccattaccatccagattaagaattagaatatgataatgaccattggatcccattgtgtattacagcccagcacatcttcctcctctccaagtggtaaccactctcttaaattttgtgcacatcattcctttgcttttagtaataattttactatatatgtttatctccccaaacagtatatggtttagttttgcatattttgtactttatataaacagaatgtcttctttggcagtttacctttttgcttagcatattatttgtgggattcatccctgttgataaatgcagttctaatttattggtcacttttgcagatgtacaatgttccactgaataaaaatagtgctcgttctcttgttggtaaacatctgagtggttctaaatcttttttattagaaacaatactactatgattcttttacttttcttcgaatgcacacaaagaattcttacggtttatacaaatagggttagaatgattgagtcatgaactatatacacatctttaattttattagataacttaaccttttcccaaaagttgtacccagtacatttccacaagttctatgtcaaagttttcaaggctcctctccctcagcaatattttcaaagctttaaaatgtctccaaatatattatatggaaggttgtatttcattgggcttttcatttacagtttgttgattcctatgatcctgaacatcctttcatatgtttatggtattcaaactccctctgtgatattctcctttatattatttgcacattttattggcatctttttcttttaaatttacttttaggagtttattaaaataaattttaggtatcaacccttttttgattatatctaatgaacatcacatatattataaatgtattatctctttttacttcttctaatgttttcatcatggtttgggctttttgtatcttttaatggaaatatttctgtatcttggtcttaaagttattgtaaacattttaatgttttgttccttatattcgagtgatccatatggaattgagttttggagtacattacgatgtagtaacacaattgtatgttcttatttcatttggaattcccaacaccattatttctccactgataagcaattccacttgttatatatcaactttacatatatttataggtccaattctttgtttcatttgtctctgtaatctttttgccaattccatgtgtgttaattgtatttttattataggcactaatgtccatgaagtatttttttcctttgtacacgttttagtaacatcttgtcaagtcctctcatgaccctgtagatattttgattttgctattaattaaattaatgaattttgaaaaattgacatcttttacatattatcatcctatccattaatgtgaccaactcttcaacttttaaatggtcttaaaatatgtctttcagcaaagattttaactttttctatgatgaccctgtgtcacttttcttagatgtattactgggtgtaattagttattttattttttattgtaaatgaacttattagagatacatttttaaactctccgtgagtggtaaatacaagtgcaatggatttttgtacgtttatctcatatccgacaatcttttaaactctattattcttataacttgtatattatttcatgctttatctgtccacaatttgtacgtaatgacaatattatttcttttttgcctatcttgattcactttattttgttttcttgtctgatattcctggctataacctccagtaaactttagaagagaatgctaataaggagtatctttttcttgcttttaaaagaaatatgactataggctttgttgtactatttgtagttatattttatcaagttcaagcattctcttctattcctagtttctgagatttttgtttttaaagtcttgaatgccaattttataatatgtttttcctattctatcaaggtgatcatataatttttctcattggatgtgttaatataatgtaatataaatcttgctggaaatcagtggaccccaaacagtccctctataattttatttttatttatgtttattatttatttttaaataaggtttacttaatcagagagcctctgaaggcatcaggtttctgtcatttttttttttaaaggcaataaactggcaactcgggtgcatgatgggtaggaactgggcatggggagctgggaggggtacatggagagaacacaggggaacaggcactggggaggggaggagagagaagaaggtggaggagtatcagatgggaccatagaacagtcagacccagctcctagccacccctgggacaggcagacaatcggacagacacggatacagacacacacaaagacacgtgtgttctgtgagctcaagagcctctgctgtcctgcacaagcagggatcagtcagagccaagtgtggagaaactcaagcagatgcacaggctgcgcctgatccctcaaccctgaccctcaggcccacagtgtctccactggccacccagaggctctctccccagggactggacatccaggcccagcgcaggtcatggcaaagcagaagtcagctagaagagaaaacctccagaccactcatgcccagccctggcaggaaaataaaggggtgggaggcagagaggcaggcagtccttctgtccatccatggtcacacgattgcatttaacaggaagaagacagcccccagtgccaggccagttcagccataaaatatatatattttatatatatttctttgatttcatttatgaatgtttaggttttaatgtttatattcatgagtgtgttggtttgtaattgtttttcttgaaattcttttgtgtggtttttatatctctaaatgatttggtaagtattccctatcttttaatcgctagttatgtttaaatgatgttggaattatgttcaattccaatatattatatcctactctagtagaaattttctgtaggcctagtgttttatcttgtgtgaaggtttttaatcactgattcaattttcttaaccattcggttttttttttttaactaagtttggttaattttttcaagtaatttggccattttatccctaacccattatcttatcctaatttatccttgacccattatttccctatgactgtgtttaaaaatttgaaatatatgagttgatgtagttcttataatgtgtttctatcttaatttttagtcaaaatattacatggcctatatgaaactatccaaactcactgtatgcctttttaaaataaacttttaatttttgtggatacatactaagtgtatatatttatagggtacatgggatgttttgatacaggcatgcaatgtaaaataagcacatcatggagaatggggtatccatcccctcaagcatttatcctttgagttacaaacaatccaaattatattctttaagttatttaaaaatgtccaattaagttatttttgactatagtcaccctgttgtgctatcaaatagtaggttttattcattctttttttttcttgtagccattaaccactcccacctacacccaatccccccactacctttcccagcctctggaaaccatccttctactctctacgttcattagttcaattgttttgatttttagatcccacagataagtgagaatatgtgatgtttgtttttctgtgtctggcttatttcagtgaacacaaggatctccagttccacccgcgttgttgcaaatgactggatctcattgtattttatggttgaagagtactgcattgtgtatacacaccacattttctttattcattcatctgttgatggacacttaggttgcttccaaatcttagctattataaacagtgttgcaacaaacatgggagtgcctttttattataaacttacataaatccctcatgtgtgcttgagaataatgtttattattttattctttggagcagatctctgtatttgtacattaaaccaaatgtgttttcttgaaaacatctgaaacaaattcatttttatttgtataatttatcaattactaaatgagggcccttccttagaaagccaaaactatatggggaatttatcaattcttattgtagttttttaaaaatttttgttttatataagtatatacaagtttctaattggtatatccttgtcttacattgaaacattattattagtgagatgactctttttccaatgtaatcatttttgccttaaaaatctgctttttttttttaagattgctattttactctccattacttttttagttttttttgtatttacacctttttccttttgatggtacttattcatctattccatatattatattacttttctttcaacctttatatacatctctttaaatcagccctaagctgagtttacaaaaagatgaaagtctgtctacataccattttctttttactggagagtgagtttagtccatttacattcattgtgattgccaacatatttcagtataattttgctatcttattttgtgctgtttttcatatggtatttatctctctcttaaaacgtatttctttcctttttttgtattcaatgtttattttgttttactttttccatttatgttaggatgtacgttcaaactacctactttacaaacatgaaaatcaccatgcctctcaacacctgtgtgtatgtgcacctgcatatacacacacaattatactcttacacacacatccaaaaccaagaccagggcaaaatatttccttagtatttctcttcggtgggtgaatttttaaaataatctatgtttttactgattgtgcagccctttggagacgcgttctttccagctttatgtgcctaggttccaagtctattgcaagtgaccaaggccttgtttcttgtctttgttggctgctagaagagaaatggagtttgaagtttagcagatgcttttataatagccacagccttaaattattgcttataattttcttctttattcctactttattattctcttttgagtttttttcttactttgcagaataaacactagtattacttggtgttgggtagtgggtatgttcaggggttatctaatctaccatcttgacagaaacagaagcccccaatgctattttactcttcattgctttcctgtgatatcctctatataggtaaagaaggcttaaattaaggagggactgaaatactatgaagtacagtcagtgaattggacattggacagttttacctggtgaaacctgtctacttggaggtctgtatcactcaagaactctgttgctgctatttctggacagttgtacaagaaggatgcaatgaacaatttttatcttaatttactttgatttagagaaaaaatagtctgtgtgatataggaaaatctgatccagcgtcttttgttcttaaggttttatcagcatgatttgagattaaaatgaattagaaacttccaagtctgcctttatttttttctaatacaattatttgctaaatatgtaaaaaataaaaagttttcaagattgcttaggtttattactatgtgatattcatctacatagaagaaacaaataccttatagttcaattaaactagcctttaccttatgtgatttttataacatttagaaggatgtcttgtgatctaaagacacagcttcttggaatgagccttaattagcagtctaagttttaatattatgtttgtcactgatgcaagtcaggtagtttatacatttcagttttgtcttctaccaaaggctgcctaatcctaactctgaaaaatgttagaatatgctggtattcttgcagctttctcctttttgtttttatttttcaaaatacttgcatgtctgtacattatacaatgacaatcatgtggcctcttgctcagtctctttagttgccacatggcaactgtctctcagctatcatttcagttttggcagcatcctattgtaattcacttgtgtatatcaatgactggaaaaagtgaaatgacagtgctgttgaaataaaggtagaagccactaatacagacgtaagtagtatttagtcttattcagacactcattgtattgactgagttcaatggtaaagtaaatgaacaaaactaaatggcatgaataaaatgttgaaaatataccattgaaggttgatccaaaagatgggatttcatttgagacataatatttatttatttatttattattcttatactttaagttttagggtacatgtgcacaatgtgcaggttagttacatatgtatacatgtgccatgctggtgcgctgcacccactaactcgtcatctagcattaggtatatctcccaatgctatccctccccactccccccaccccacaacagtccccagagtgtgatgttccccttcctgtgtccatgtgttctcattgttcaatcccacctatgagtgagaatatgcggtgtttggttttttgttcttgcgatagtttactgagaatgatgatttccaatttcatccatgtccctacaaaggacatgaactcatcattttttacggctgcatagtattccatggtgtatatgtgccatattttcttaatccagtctatcattgttggacatttgggttggttccaagtctttgctattgtgaataatgccgcaataaacatacgtgtgcatgtgtctttatagcagcatgatttatagtcctttgggtatatacccagtaatgggatggctgggtcaaatggtatttctagttctagatccctgaggaatcaccacactgacttccacaatggttgaactagtttacagtcccaccaacagtgtaaaagtgttcctataattttaagttgctaaataaaattctctgtacctttcggatttattcagatttaatttaagcctttcggatgaattcagaacatttaattttggttcatcatttcaagtttaccttttgcctttatcctatgttatgatacatgaagaaaaacattaagagaatcatcaactgcctggtggttataaatgtactggaaatatttttcaatacatttttgaaaatgcttgtaatggataattcatggctaaaataattagttcttttttgtgtagtctattaattttcgagaacaagtataatattctttaagatactttttcctactttgtcttattctgtatattttttctgacacacagaacaatataaggccattgatcctcccacctccaccctattttctgcttctttttggtaaatcttagaagcattttaaattccatctgtccctttttaagctttcaccaatttacgaaggacttattcactttctggagcacctagcttcaatctcaacctttacttgacaaaataagtcttccatgtaaacatatatttgatgaaaaaatttcaacaaacaatgaattattattatagaaaatgagaaaaagctgtaacaaaatcacctttaatctgcctgccaagaaataaccaatgctacattttgatataaactccctgaagtatttaaatttatgtgaataaattttacatatgtgttattttatctattttatgtagagaaatgaatcaaataatagttaatgaaaggttttatcatttctttttattcattcaaaatagagccatttatatcatacttatttccatatcgataaatgtgcctctacaacttatattttgtatataacaaaattctattacatgatataacaaattttaactaatcctcaattactagaaattcaggaggtttctaagaacattattacacacaatttttgagcacctactatgtgccagctcatatttgaggcactggagtttagcaataaacaagacaggtaagtttctgctcatatggagcttatttctggagagtagccttgaattaatctctattttctttaaccgaggtatttttcctcattatcacacaggtatcttaggttgttgtccagaggtgatgctttttatccttcttaagggaaaaaacataacttggatgtatctccccatccgtttcttccaccaactatgagtaacaattcatggttaagagatttaattctcttttttgtgtagcttatgaatttttaagaacaagtacaatattctttaagagacttctttctgctttgatttttttaatatattttgttaacacagaaaaatatagggccattgatcctcccacctccaccctattttctgcttccttttgtttatttccagaagtatttaaaattcattttgtctctttttaagttttcacaaatctatgaagaactttttcactttctggagcgtttttcacattctctgctttttttttcaaggctttgatggtacagaaaaatgactgctcttgcaaaactaaaagtgtagctggaatatttgtatttattgattaagaatcatcttttactatcactctttttaaaaataaacgttcctaaataaacacagtttagtatatatgagttacagtacagtttcatctaagcctcatagactacatatattttagcagttttggtggtggagttttgacagccactttttactcttgcgttgtcctgtgtggcattgctccatatccttaaccataaaagctgaggtgatttctatagcgctcgtaagctctggacagagaagcattgcattagctaccgtaaaaatagttcttaagactctggtacaaatgactttaaacccttttgtatatatgtaatcatccaatcttttggcttttagttctggtttcccataaagatgttatactacctttttcaattatggtaatggcaggattttcaaagaaggatagtctataccaacaagctattctatatacataacttcaatttctgtcctctaaatcctggggaatatttgccctcttgaatgcagaaaggcagcccatctgcttctttgggtaatttacttcattattaaattgttctataaggtgataggagaacttttcagaggagttttcatcttatcagaaacatgatataccattggacttcatgcattttcttgttttcatttcttacaatacatagctgactattttctcctctacatacttttgcatggctaggggtcaactcctatcgttagaaaaatgtagattaaaagtggcactattaatgtaagagttaactttgcttggatttcatgtgtggaagttcagagataattaattgggctttcattgtagttttgcctttttcatttcaatgtataaatctattttcagggagggctggctagcaggacagcagaaatctaagacttccataaccttcaccttttgaaaaactcttcattgcttttggatagtctcaatttcttcttctatttctcttaagaaaattcagaattagtgttgaaactttttttttttgtaaaatcaaactctgttagatcctttcaagtaagtcatttaccacagatttcctggagttagattccaactagtatttatgtttttagttgacatttaggaaaggttttcagctagagttaaaaagagagtgaggggcgaatatgtgtagctcagctgttttgaaaatgatctgtttgtagaaggccacaaagcaaatatgattatcttattcttactctgaattttcaccactaaaaccacattctattgaaggaatatataataaaagtgcattatcatatagtgtcacaatgagggattcaggtgcgaagggaagactcattcctgtgaaaacatagcccatccccagcagttggtagaaggatttgctggagttcctcctctttgtgtggcctataaaacattccatgaggcatgtggcaatagtcacaatgatagtggccttatctcctccagtctttgcatcctcactcaagccacctcttttcatagacacatactttatgtttgggaagaggtgctctaggtgggacacccctgcctgctccaaataattcctactgacatccatggcaggttcattctatctgagctggagatttgggaatttaggtgggcacagaagaaagaaggggtttggggcagtgtcgtttggatgattttgacagattcttcctgggggtaaagagagataggtgtgtctaatcatccaagggaaataaaatgcaaaggtgtgtgtatatggaaaatcaagggagaggaaattaaaattatccagattgcttatttaatagtcaggaaactcaactttccatgaaggtaagattccccactgtgtctttttctttttcctagaaattgaccaatttctgagtagatgaaaaaatacaggtggctgggcgaagtagcttatgtctgtaaacctagcactttgggaggccaaggtaggtggattgcttgaagccaggaactcgagaccagcctgggcaaaattacaaaaccttttctctaccaaaaatacaaaaattagctggccgtggtggcatgtgtccatagtcttagctacttgggaggctgaggtgggagaatcgcttgagcctggaaggtggaggttgcagtgagctgagatcgcgctactgcactccagcctgggtgacaaagggagtctgtctctgtctttgtctttgtctttctctctctctctctctctctctctctctctctctctctctctctctctatacacacacacacacacacacacacacacacatcagatatgtccatcacacgcacacacacacacgcacacatgctttcatggtagttttgcctttttcatctcaatgtgtaaatgcatgtgtgtgtgtgtgtgtgtgtgtgtatgtttatgtgtgtgtgatggtcatatctcatatatgattattgttgattattgaaagattttcttcataggatactgcccttgtatggaaatatctatgcagagaagagaataacaagcagttcaagaagagttcacaggcagccaggcaaaataaggatctgttttttcagactcttgcctttgcctagaattctctcctcagcttttgcatttgggaaatgtgacaaagttttcaaggtccctttcatatatcaactcctctgaaaatctttccttgatctctagcagaattaacccttactccactgtgttcccttggcacaaccgtaagcacagttttgttttacaatattatattttgttgtgcatgtgtctttctccctagctacactaaactatatggggctaggaaggcatttaatattgcatctctagtgcatagcagtttggtggcacaaattagatgtaagataaaatgttattgaatgaatgatcttcatctaagtgatttatatcattggcttcagtttatgtttacatcttggttgctgcacaaggaagatatgtataagaaggaaacgtagcaaaggcaaaatattctagttcacttctgataagacaaataataaagctaattaataatgagtaagcgttacttgcttttgcatcacaaaaacacaagtaggttctctgtaatatttgtagaataaatgaataattaataaaagctttttaaaattaaacccttaatatatgctagacactgagtaaatttatttacttgtctcattttacttctattagactgggagcaaggtgttgttatccccattacagagaagaggatatagactcaaagaaatgatgcaactttactaaaatcggataactcacaaactgtagagttaatgttttttttttttttttttcagagggtggtttttctttttttttttattattatactttaagttttagggtacatgtgcacaatgtgcgggttagttacatatgtatacatgtgtcatgctggtgcgctgcacccactaactcgtcatctagcattaggtatatctcccaatgctatccctccccgctccccccaccccacaacagtccccagagtgtgatgttccccttcctgtgtccatgtgatctcattgttcaattcccacctatgagtgagaatatgcggtgtttggttttttgttcttgcgatattttactgacaatgatgatttccaatttcatccatgtccctagagttaatgtttaaactgaggattgtcttactcactttctcatgaaggtcttcaccactctgcgagtttcccatgaatttacaattcttcagcaatggattttttattttggtcctcattccaattgtgtatggcagagtaagattcgagtttccacagctggtggatctttgattcagtgtttattgtacttctatgtacatgatgtcctaactgttataggatatacagttttagctacataagggcagggattgtgtttaatttatttcttagtcttacagtgtctgcctgacacagcacattgctaataaaagcatacaaacatttaatttgaaattctgaattaaaagagcaaaaaaccagcaccataaatgccataaggtagtgcaagtgccaaagaaatgttacaaggaaaatgggctatgagctcagaattgagaggaatcattgtaggtgggaattgtcagggcggttggatttgataattttgtaagatattttgaaacttcctgccttaggttatttttgataattcctgtattcttttgagcagtgatttgcaggacatttcctttcacaacaagggtctggacacttgacttggaaacaaggcgaaagtagagaagccctggcccactcctaggcagtcactggaggaagggtgaggaatttgggaaaagcaaccagcatcaaatcagagatgagggctcatggcagctgaaagggaaggggacagcagcctggagtataagattcaggtatgatttatgatgagaactccagcagcaggagatgtcagggatattcccaatgttataaacttcaaaaattaaaagtttcttggcaccaacaaaatcaattggaatattaagaaagcaatactggaccaggtgcagtggctcactcctgtaatcccagcactttgggaggccaagggaggtgcatcacctgaggtcaggagttcaagaccagcctggccagcatggcgaaacactgtctctattaaaaatgcaaaaattagctgggtgtgttagcacgcacctgtaatcccagctactcggggggctgaagtagcataattgcttgaactcgggaggcggaagttgcagtgagccgagatcgtgccactgcactccagcctgggcaacagagcaagactccatttcaacaaataaataaataaaaataaaagcaacactgttttttgaaggaaggacaaattcagtgaaatgcaataattcaaagttaatttcactctgcatttctgttttcagaccagtatttagtgacttcgaaaatacagtatttctatgtccatgtatactttctacataaagtttgaataaaattaggcttaacacttatatattaatacactctctcagtgcctaaattgtaagttcctactactatgttttattctttttatcttcagtacttgccctggtgtctaatttatgttaagtgctcaacgagtgtttgattagtgaacacatttccatttagtatgtggcaatgtttagtacttaaattttttcttaagtttcccttggttcacaacttacacattgtaactacagctacaataaattgaatacaatatgcagtaccaggctccaaggaaacttgcttcatgttgatttgtgcttatgaagttgactttgggattttaaaaaacatacagaataactgtgaccacattcagacatttaaaaaaggtttcttatctatccttggctttgatttgtaagttatataatcaagatgaaaacagtcatttataatcattcctggttcccatatcacagtgtatttataaaaacaatatgtagcactatgtgtattattttatagtgttacgtatcgtccttcttttggttgcttacactctagtagaaaaaaaggtcaaccaatttaggttacctataagaaaataaaataatattgattaatgtgcatacaaagtcagcgtgaggtagaatagatgattttgggacagggtagtttagttttgaatggtctaaaagaaataatgaattatatgcgcaagatttatatctgataacttaatatttaaatgctgtgatttacagaagaatagtaaagggaaagctggcataagaatatgtatatatatatatatatttttttttttttttgctaaaacagaaaaagtataaggtgaatgccccagcaaatgggtttgtttcatgtatcagggccaagtgacaattggctctgtgtggttatagttttcagtcccacttagagggatgtagaagaatcccagaagttttcaaagctgattaacaacttaaaaaggaagattaccagagtgctattgacaataactaaatggagataataaacggccttaaacaggtttatcagtccagaaaacattgctatttagaaaaacattggatgccttcagtatttagggatattgtttctcagaccctctattaagggtatcagaagacgttttctttaatcaaggcttttagcttctttgcgatgtgttcaaacatcctcctttagctcagagaagtttgatcatctgaagctgtcttctctcaactcgtctggaaaccgtcattctcagcaaactatcgcaaggacagaaaaccaaacactgcatgttctcactcataggtgggaattgaacaatgagaacacttggacacaggaaggggaacatcacacaccggggcctgtcgtggggtgggggcagtggggagggataccattaggagatatacctaatgtaaatgacgagttaatgggtgcagcataccaacatggcacatgtgtacatatgtaacaaacctgcacgttgtgcacatgtaccctagaacttaaagtataataacaaaaaataataatgaaagaaattttctttaaaaagaatgaatataacctagaaatgcattgtgttattttttctgtcaactcaaattattgtgtactgtgcacttagtcacctgagggtgcacagcacagcagatagtctcagctctgatgcaacttatcatccagtgctagggatgtgtgaatgattgtgcagataaacaatttggggacatttcataatacagagagacgtgctgggatggtattggcgtcaagtgtttggggaatacttaagaggagcagaatcctgcttgagaaaaacccagtgtgactttcttcatcttgcaatattactttaaattaatttaaattgctaaaatatggtaatgataatgacagcagatacatggagcatcttattatgtgtcagcactgtgaaaatattttatataaattatttcgttttaattcttaaaattacactgccagataggcattaatttgttttgttgtttctattttgcaaataaggaaagtgaggcctaacattttaagtaacagtctgagtagcacagaattaatcaggggtggtgagaggattcaaactcttggacttaccttacaactcttaacttactgaacctttagctcttaaaactctgttaacttacataaacacgggtgaaagttttgaaaagagacactaagcaaaagcatagtattttttgctaaaacaactactgttcaaaaattaagaacaaactttcccacatttaagtagctatgaattttaaagattgcaatgccaaacttgttgaagttttaaaaatgaataaggctcaaatgtaaaactcattttttggcatctgaggacaggaaatgtaaatttgaaatgaattggacaaaagtaaagctactcactgaaactgaaatcctttgtcataataacaactgcaggcttctttggcgcaataataattgtaaaattttaatgtatgattgaagcagaactatcagacaaggaaaagattcacaatctttccaataatagatatgttaattttttatgacactgtacaagaacaagtttaaggttactctagaaggttaaacatttgatttttagttttactatttgtcttttatttatcaaaaatttccagtctaaaaatggttaatttcacaaatgaagaaaagtatcaattatggaaaaatcagaggacataatttttatatcattcctttttttttttttaaagtaagtggctaacacattgccttatatggaacgatcttttcctcaggaaatctcttttgattaagaagctgcacagtgacatagaaaaatatagcagagtgattgcttcctctacaaatcatatctgaataataagtagtcaaagcaagaataactgggaatattgaggtgtcttcattttctaacctcagaatatttcaccaatttattttatccttaaaatgcatttgaaactttttgttgccttaaggtttgcagcacataaaatgatattgttggagaacaatttgaactgaggatgggttatgaaaagatctttttatcccaagtaataccaataccaaagtgactatttcctgtgcctactgattcttaaatgacaatttggctcaccacactcagacttctcaaaatagttcaacctaagtggatctgacaactgcctagaaagcttgtccgacccaccttattttgttgttgctgtttttctgttttgttttgggcttttagcagcctgaagtcatgttttttgttttctgtctgaagtggtaagcagaaaagaggggagaggaaggggctttactggcccaaccagaaacagaaactaagaacctatgtctgtattctctcccttggatacctgaaaaaggacattaaaaagtcagtgtaaaacaaagaaaaaacaaaaatgtaagcgaaatttatgactttggttcaattatatcccagatatcccaaatctgtagaaataaccaaggggagatcaaaatttttcaagtataaaggtagtactcagtttttaacttcttaaatgaggagtgcccctcagtcttctgttatataaaaatttactgttgcatatgtttccaaataatgaattaccaagtatgactgatacataaaattatactatgaaagaaaacttacaagtatttgaaatatatcaagtatcccccccaaaaaacaaaccaattaacttgaaattgtaaattacacaaaatgtaataagtaaattaacatataaagtcttttgtaaattaaacaaaatatatcaagtaagttaaaatataaagacttcccggatagattccaaccaaaaagttgctcaggagcttgaaaataccttcttaaatgctttggctcacatttctagtttaaatgattattgcatatatttttgagacatggcatatgattttatatatatatatatatatacacacatatatatatacacacacatgtatctcaagaagagatggatagttgtatagcttgatatttgtttctatgtttgatttaacattgtcatataaatttgtaactggcactacatgatattgatgccttgtgattcccataagtaagaaaagtggacagttgttttttatttatttccgttcataaatgtcagaacaggtacccttaaactatggggataagttttggcttaagttactggaactttttgaccaatatatttaactagaatgagaaaatgtactttgacaatttcaagcatagttatgattctatttcctaaataaaaattgtacaaaatttaatattttacttttatgtaggtattttttttaaatttgtgaatgaaggactttcaattttttatcaagtctgggtgagtagtagttgttattgcattacctttatgcaaattagaaaactgagaagtgacgaaagtcagatagcaagtaaataagtatcagtcagggctggctggctgacttcaggttcaatattctgttcattaaactacaagtaatgttttaaatctattcaatgttgcagtgatatcaaaaagccatagtttgtgatatttgtgcagctactagtgttgtttcttaaatatattttaaaatacgtgtcattattcaatgcttggaagatgcaacaataaaaggttatgcattttttaacaagtgaggacatttctgtataagattatcttatccatgtttttatctttatcaaaaatttactgattataacacagtaagtgctaaaggaaggtatgagtgtaatactgtgaactgatatggatagaatattttggcgtgttgggagatgaatgcttgcctacagaggattgatgacaaagtcagagggtatcaggatgtggtcccacagaaagctctgggcttaaaattgagatattggagtcatttagtatacatggagtcaatgtttgtgagtatctaaattcttacttgcaaaaagaaggagattggtagacatcagggtcccccatcgttgaattctggctaattctgccttatcatccctttcgcactcacagtgtgcacaattttcctttttaaatccctttggaagaggatgcacttgacatttaactatgggccccatcatcctttctggtctcacgatccatctgatttacagtttttgttatctgcctagccccattgtagattaattccaagttctctttttgctaagcaaaacaaaacaaaaaaatccttgcggcattttcatctaaaattaactggttgtatgtgtaattgcaaacaaataatagctaaagccggcttctgttccagataatactgttttaaggctacaaaacctactaaaattgttaaaggtttctcaattgccaaaatataaagatatccccttacaaaattattaacattaatctaatagtctgatttatgaaaattcttaagaagtacattaattacttgactaatcagccaggggatccagcattagctttctcaaatttaactgagctgaaaggagtctaatcctgtgatacagagaaataattgggtttccaatgtctgatagtcttaattcatggagatagcttgagtcccttgaagaaagatctggtcatcagggtctgttaccctctaatcgtaatccttatttcttctcaaaggtcttgctaccctttttactggatttagaacgccatgtatgatgctttaactttccatccgtaacagattttctctgtctgttttgggtatttccactcattttcttctctttgtctcccatcttcctagagaaagagaagtcttgttaccctttttactgaatttagaaagccatgtatgatgctttaactttctatccctaacacattttctctgttttgggtatttccactcattttcttctctttttctcccatcttcctaaagaaagcgaagggtaagcttatcccatctcctccctcaagtgctttctctttcatttttaattctctttgcctagctttttcccctttgtgaggaccaagaaaaatatcctgtgcttcctagaacatgtgcactcttctttccctccttgtattgcccaacttgtttaaaagtaatctgcacaaagcacacttcacatgtgcctcaactgctcactacctaacctcttacagttggtaatcttctcccactgcccttctgaaattgcttctgctttgccttgactggcatttattgctttctgtctgattttaaaagtgatatctatttactgtagaaacttacaaagatataaaaaaagaaagaaaaattacctttaataccattctccagagatgctggattataaggcacttctatttttaatcttttgagaaacctctagactgttttccataatgcctgtactaatttatattcccacgaacagtattccagagttcttttttctcacctcgtcacccacacttctcattttttgtctttttgataatagccatttgaacagatgcaaggtgatagctcattgtggttttaatttgcattgctctgatgattagtaatgttcagcattttttcatatacttcttggccatttgtatgtcttcttttaagaaatgtctattcagtttatttgactgttttttaattagattttttttgctattaagttgtttgagttcttgtatattttgtgttttaatctcttatcaggtgtgcagtttgcaaatattttctcccattccataggttatctcttcactctgtcaattctttcctttgctgtcataaagttttatatgttatgtaatccaattgtctgttttcactattgttacctgtgcatctggggtcatataaaaaaaatcactgccaagaccaatgttttggagatttcccctatgtttccttccagtggttttacaggttcagttcttatatttaagtttttaatccattttaagttgatttttgtaaatggtgtaagataaggatctaatttcctaattctacatctgaatatccaaatgtttcagcaccatttattgaaagggctgtcctttccccattgtgtgttcttggcacatttactaaaaatcaattaaccatagatacatggatttatatcttggctttctattctattccattagtctactttccttttatatgctataccatgctgttttaatataattttgtagcatattttaaagacagatagtgtgatgcctttagctttgttctttttgttcaagattgctttggccatttggggtctatttgtggttccatataaattttaggacagttttttttctatttctgggaaaaataccattgggatagttatagaatttgcattgaattggtagataactctgggctgtatgaacattttaacaatattatttcttcacattcatgaacatgggatagcttgctatttaatgtgtttaatttatttcatcaatactttatagttttcagtgcacagatcttttaccttcttagctgaattattttaaagtattttattttttggtagctattataaaagggatttttttttagttctttttttggaaagtttgttgttagtgtatagaaatgctactgataatcgtatattgattttgtatcctgcaactttactgaattgatttattagttctaagaggtttttttttctttttcttttttttttttttttgaaggagtctttgggtttttctatttgttaagaccatgtcatctacaaacagggacaatttagcatttaatttccaatttggagaccttctagttccctttagttctttcttttgtctatttttttctggctaggacttctagtactacactgaaaaatgtgggaagagtgggcctccttgccttgttcttgatcatagataaaagctttcaagttttcaccactgagtatgttagctttgggcttgtcatatatggcctttattgtgttgaggtacattccttctattaccaatttgttgagaggttttatcatgaagggttattatgtttgtcaaaggattattctgcttctattgatatgatcatatggtttttgtctttcattccgataatgtggtgtatcacaattatagacttgtgtatgttgaaacatccctgagataaacaccacttgatcataataagaaatccttttaatatgctgcataagttctttgctagtattttgttgagagttttcatatttatgttccccagggatattgacctgtaatgatcttttcttgtagtggctttgcctggtgttggtatcagggtaatgctggccttgtacaataagtttggaagtattccaatttctttaatttattggaagacttcaaaaacattggtataaattattctttagatgttagaattcagcagtaaagccatcaagtcctggcttatctttgctagaagactttttattgcttatgtaatttccttactcgttattggtatgtttgggttttctatttattcatgattcagttttagtaggtagtgtatgtctagtaatttatcaatttattctagattatccaatttgttggcatatgattgctcataatagtctcttatgatcttttgtatttctgtggtattagttgtaatgtctcctatattatttctaattttgattctttttttaaaaattaatctagctaaaggcttgtcaattttattatcttttaatttttttgttcatctactataggtttttgctctgtaactaacatgaggcttgcttagaacatcttatagttataactatggttattttaagctgatgacaacttttatcacattaaaaactgaacacttttactccacatattctaacattttgtttttaatgccacagtttaattttttaattacatattccttaacacattattgcagctgtttttttaaatacttttgcattttactctttatacaaggatatgtgataattagccattacattattagcatattctgaatttgactttcaccagagagttttactttcagatgattgtgtgttatacattagtgtcccattttttttcagcttgaagaactccctttcacatttcaggtctggtagtaattaatttcccaaatatttgttttgttttgttttgtctgaaaaaggctttatctctcctttgtttctgagagtatctttgtcaggtgcagtattcttggttgacagtttttttttttttctccgcagcattttgaatatgcatttgccatccattatctattggcctttaatgaattttttttctgtgaaatctgattctagcctgattggaactctcatatatgtgatttgcatcctttctcttgctgctttcaggatcttctatttgcctttgatttttggcagattgtttataatatgtctttgtgtagtcttatttagattgaatctaattggagactcttctatacctagatatttatatctctacctagatttgaaaagttttctgtgatcacttatttgcataagctttccacctctttgtctctctcttcttcttcttgaactcctaaatcttgaatatttgatcttttaaagctgtcccataaatcccatgttttatttattccttttcatcctcttttcttttttctcctctgattgtatattttaaaataaactgttttcgagttcacagattctttcttctgctttgataaattctgctgttgatgttctctattgtattttgttgttgttgttgttgttgtttagttcattatattttccagctccgggatttctgatttagaaaaaaattattttaaatttctaatttggttgtttattatagtttttctgatatcattttattgtttctctgtattttcttgaagtgttccagactttcttaaaataattattttgaattatttgttagacagtttgtttctccatttctttgtggtcagcaactgagagattattgtattcttttgatggtgttatgtctctttgtttttttttttttattttgttgttgttgttgtcttatgttgataactgcacatttggagaagttgagacttattttagtctttgcagactgactttgtctgggaatacccttcagcaatcagcccatccagagattctaggcaggccatttgctacagtttacaggtgagcttgctactggagttctcatgcaagcttatttgattcttgggttcagcaggtaggcaagcctgatgcctgggtccatgggattgggcctgaatcctggatccacttgggtagacctgttgattgagtccatgggggtgggcctggagcctgtatctgcaggggctggcttaaaacttgggtccacaaaggctgatgtactggtgggataggctttgagcctgagtctgcaggggctgaccaggtactggcatgggcctaggacctgggtctactagaacaggcctggagcctgagttcatagggtctggcttggtgctgcagcaggcctgaagcttgtgttcatgggggcaagtatggcttctgggtccattgggggctggcctggagcctgggtctgcaggggttcatgagggctaccctagcactgccctggcactcaggggtctactgtagttaggccgaaccctgggtatgctgaagccagattcgactctggatccaactggagcatgggtccatggggactggcatgaagcctgggtcctctggggttggcctggagcatgggtgtgtgagtgctgacctggagactagttctatgagggccatcctggaatttgggtccacagggatggtcctggagcttgagtatgttccagccaataaattgctgtgatttactgtgatgggtctgaagcctgtatctgctggaggaggcctggacctcgggtctgctggtgtgggtgtgtgctggggccagcccaagactgggcagacatggagcatgcgtccatgggtgccagcctaggtcccaagaccaggagtgcttagctagccctgtgtggacctgaagcctggggctgtgtgggtccacccagctctgtgctggtctgaaacctggggtagtcgtggagaccaaagggcctggcctagaggttgagtctgaagatgctggcctgattactagggatgtgggggctggcctggcactggggttgacccgaatctcagacctggcttgggggacagtatgaagcctggggctgtaggaactcaactggttttggcactagcttggaggttcagtctgagggtattagcctgaattctgggagcatgtgggcttgcccagctgtgttttactggggtgaacctggtgttggagtacaaggcaaagtcttggcaccaactctgaggttcagtctgaggtctgggagcatgtgtgcttgcccagctgtgttttactggagtgagcctggtgttggagtccaaggccaagtccactgctttcttccctccctttccctcaagcagagagtatttctccccatgctgtgctgcaggggaaggattgatgtgggtaatgtacaactgtccttcctactctctttaatgaatcttttcttatttttgtgtcacactcaggtgctataatttttcacctgtttccttagctcttgtaaaaatattttcatgcagggatagttgttcaaattgatgtttctgcaggaagccagggaatgaggactggaaagtcctattctgccatattgctgacatcttgctgatcagaaccccagtcttcagttgttaaggatttagaatattttctattataaacaagtattggaattgctctcttgaagattatcagtaacccctaatgacgtaaaccaatgtcattttctgggccttctggcatttggaatggctgctgcatcttttgagatgaacttccctctgcctttgattctctttcttttgttctgactttttattcctctccctctcctaaatgtagatgtcctttgaggtagtgtcctttgctttctagtctaataaactcttctctggaaaatttacttttctgaaatttacatttttagtgttgaaatctctcacaagttctatcccttttttcttcttaaacatttctacttaaaaccaatgttaaaaccaaattggatttaccaaagattatataaaattgaacttcactaaccccaaatttatgactttttgtaacttacagatttaatggtactaactattgtctgaattatccaagcaaagcttctcatgtaaactcgtgcatcttttctgccaacatgtccaagtccttttgtcccctcccttcctttccatttaatctcaatgaaattcatcctctactgttttaacagaagttataacttctattagcatcacctttaggctgcccaatatcgtcatttaccagaaaaaatgtgttctttaaaacataggtcagtggtccaatatgtatcacaatataaaagcaatttgaaaaagtttttgatacttcagttacctgcatcacagaagagttttctttttctatgtagagggttagggacagggtctctttgttcctgctttttcaaggatttgtggtctggaaggtttttcactatgggttcccctctgatactgctttctaatcattgaaatccatacacagtgtattaggtaatatctaagctgatagcacctctgacatggtcttatctacttgggatgtactcatctgcctgagtcatcgtcatgttctttaacaagaaatcattcaaaaattgccctaccgtggtctgtggacagttaagacaggcactccacagatacataccattcaactctaataaaggctacccatttttcagattactttttaaggcaaaaatacttctgtacaaatagttaaataaattacatatgctatttttgtgtgttcgtggtgcttaaatgaacagttttatttctatgtgaaagagaaaaaaatggtaatgttattacaggaaaatactatcatgttaagaagaacatatgtttgactaagattttatcatattaagcacccagctgtctttggccattgaagctttcttggacagataggttcctgagcattctaaaaacactctttttgattgccaatatgatgtttggtttcagagactttctgtctcatgtatttgccataaagaatgaacatactgatgctctccctcagttttagcaagagaaacattttagagcactggaatgaggtactatggaaggctgtataattaccttccattaaggtctttaaaaacagaatggctatttatatttcttgaattgtcttaaagaagctctttctacatgggaggaatggttctgtgatggtttttgaggtcattttaggtcttgagtagtttttatgttttagataagtttggtacagaaaaacacacttgttcagaaaaattgggtctggcactggttctatcataaggttattgcataaatcctaattctgtcaccatttctaaacagtgttttaggatggaatgaaataataagtgtaaacattctgtcgcctctttagaaaacagcttgatttgaatttctctgatggctagtgatgatgagcattttttcatgtgtcttttggctgtataaatgtcttcttttgagaagtgtctgttcatatcctttgcccactttttgatggggttgtttgtttttttcttgtaaatttgtttgagttcattgtagattctggatattagccctttgtcagatgagtatgttgcaaaaattttctcccattttgtaggttgcctgttcgctctgatggtagtttcttttgctgtgtagaagctctttagtttaataagaaaatgtggcacatatacaccatggaatactatgcagccataaaaaatgatgagttcatgtcctttgtagggacatggatgaaattggaaaccatcattctcagcaaactatcgcaaggacaaaaaaccaaacaccgcatattctcactcatagatgggaattgaacaatgagaacacatggacactggaaggggaacatcacactctggggactgttgtggggtgggtggagggatagcattaggagatatacctaatgctaaatgacgagttaatgggtgcagcacaccagtatggcacatgtatacatatgtaactaacctgcacattgtgcacatgtaccctaaaacttaaagtataataataaaaaaagattaaaaaaaccataaaacacaccataataaaatgaaacccctaggggaaaaaaaaaagcaaacagcttgaaagacaaatccaatacagtcttgtctaattgttttttaatctctatacagctgaactgttgtgatggttgaggcaattaataaaagaagtctgcattttgaagaaataataagtgagaatagaagtcagggaagaccattgtttcacagaggcgacctaagtggtttcaacttatacgaacactgtgtgctaacagctgtgggtccgtcctccttttccaactttgagaaattttctcctttcaaacggttctttcttatcccacagtctgctctgccatctctttcctcattacttttcttggcctgagcatctgttctttcccctgtgtgctgctaagggaagaggcaaggtggtagagtgaaaagaacagggattttgaatgaggcagacctggattggaatcttgctttattacttaccatcaagattgctttagtcaagttacatatctccatctaaaacactgacataatttctgttacaaaacgaggtgatatattgaaaacatcttagcagggttgctgacaaataatgaattcttaataattattaggcattattgctctattttcatatggcctgtcaaaataccaccaccacccaatttaaacataattattttaagcctaataaaaggaatataaattggctttagaaaaaaagtataaataggagcaaaagttatttgagtgagatagccaaacataaataaaagcaggcattattaacataaacagtttcaattaagatgcatgcttttaaactgaatactttatgagaaaagtatcaagttctcagatataagttgaggatggatacctctggtaattttcccaaattagaggccactatgaagaaataatatttcagatatatactcaaaaatggaaatgtatttcaaatctgtatgtttgttggtgaaagcatgtgatattttccaagtcaaagaggctgtgtggcattagagttaagtgcagtgctgggtttgtattccaactttattagttactagctgtattatcttgggcaagctatctaactgccccatgcttcatgctttcatgcatacatttggaataataatagttctgtgcttacatagtttgtgtgtgtgtgcatgtatgtatgtatgataattaactgaattatttcatgaaagggattacaacagtcttcggcaaagactaagtgttcaatattaattaggtgctcttattgctatcattattagtagtagtagctacaggaagatagtgctacttgaaaaaaaacacatcttccccaaattattttatggctaacatggattgagcattgaatatcttcacagactagaagaaaacactgtttgagcctaaaacaaggggatcaatattatcagtatttcatttatttattgatgaagaagttaaagatagctacaatgttgaaagctactccacataacaaagtaaagatctattgtctacttggtttgcaaataagatacagtattggagttgtgcctaagtaaaaattattttttctattgtgaaaatatcaattacacatttattttttgtaaggtacatttttaatcaatgtccctagtacttacaaacatatagacacacacacacacacacacacacacacacacacacacacacctatgcaattcaatccttgctgcaattctgcaaggcagatattaatagttctattgtacaaatggaaaaattgaagatgagaaaaattctgtgggttgcctaaagggatgactaaactgagtaaatgggatacttcttgactcttctttgggtcgctttgtttctctcaaagtatattcacttcccgagagtatgactattacacttctctgtggacctctgctatattttatgttcagaaaacgtaccgtatttaagaagaaagttcattctttgcaattaaactctactaagaaatatgggtgcattcgtatggagagctgctgaatgcctgagtgtggcaaggaaatctctggaggcagaatggaaacaaaactcactctaaaggagtttggggttccaggcatttacaaaagtagaaggccagagataagcatggaagatgctgatcaatagacagactggaaaaatgtgaccatagtcacagaggggttcaattgtagctgcattaatgaagcaggttcttgacaattttggtaaaccatgctgatagccagcagcatgcaccaaagagtaaatcatgctctctggaggcctatcacagaagggatgccaactaatgagattccacacatcattgtgatgaggtatgaatgctcatcaggaacaatcgacctagaaaccgaggccagtatttcaaggggtatcttacggtcaagcccttactggtgtagacagctccagatgaaatatataattgttctaagccaacttagtgacagagcaaccctgactatttcctaccagggctgacaggttttttggactgggtatggatgagtaaaccttaaaatagaacaaggggtaggctaaatccttctggtcttgtgtgttgctgagagaataggaactctggaatcagagagaccaagattcaaaactcagctcttctatttattttatataatattgggtaagtatttaccttcctaggctttagtttctttatctctaaaatgggactaagaatacctacctcaaaatgcctaatataatatacataaatttctgtaatgtaacatctgtttaataatttttattttattttatttaaaaattttttaatttcaatattctaatttttaggcataagccaataaatattagttttatcagcctccttctattaatatttgagaccagaattgatatacaatgtacttcatatcttttcctgattataatttcctcacattcttgcttttttcttaaagttgatgatgcgtttattcattcgacaatcagttattgaacaaatataatgtgccaggaacagtgtcaggtactgagactgcagaaacagaagacatggcctttcttccaagttaatcattgcagcattcatagacaacttccgtacaatatggtgagtacaggatgctaggggagcacctcggacagatagagtgatgatggttaacatctgtggtacattttaaagtatgagtataggttatccaggtaaacgtggatgagaataatgatacattcccccaaaaggataacacatggaaagatatggaggccttgcatggacaaatatgggtctctttcttgtgttttaggccatttataatgtgtaaatggattccaataaattagtcaattcaactgctaatcacggacacccatttccatctagccttctcttttgccacttgttggtcattcttggctccagctacctctaattatctagttttctatactgtttggctgtgtaaactaacaaatctctagggataggctttagatttgcaagcagagtctggatgtttttcttaacaatttaaccatagtcagtgccacagatgtgttagcaaaaaataaaagtgtaaagttttattgggaattaacatttcaatgcagttgctgctgtactttacacacagccttgaaaacaagtattataaattgaataaccagaaaagattataactccctacgtctaagatgtgtgttatcctaagtgtctattgtgtgcaataatgtaactagtttaaaaacagtgttcaaattttgtccaaatagtctatcaaagcaaaggatggaattctggtgctctgtactttagttggcttgtgtgtattaagatgagtagctgtaaactgaagtcatttgcataacactccacctgagggccccaaatcaggcctcatctatgcaatcgtgatttttattttattttagttagataatatattttgaacaaaggaattttctgtttgtatattattacctttaaaatgtcactttgtctagcaaagtgtaagctcacagaaatgtgtggatatatagagaaatgttgaataaacacatttacattactagaaaagaaaaagtgatggctggtgacttaggattccaagatgtgcttatttatcagtatagagcttggctgcctctttatagttttctagtacttgtaggaatattagtaagttgcttaactgggtaaagaagtagcaacttaaatatatataatccattatgacacagggcttaaaggccagagagaaaacatactgtttgggacctatagttttatactctgttgtttcaaatctcattatttatcaagaagtgtaaagagccaaccaaggtgattaagggggaaaagacttctgaaccaaatatgtttactcatcactctaaagtatatgggcttatgcagaaatgctaaccctgctacaaatttacactgttcagcaaatactgggtctctatgttttgtttattccaattgtgtcctttagtctctgagtctctgaaagcatggtacaggttgaatgtagccatctgtgatgtcctgtctgatgtatcagagttatcttgacaacagacagcaaagttatagatgtactttgtttcatactaatctggtattgagacctaaggaaactagaataattataaagggcagtttttgaagaaattccccatgctatgtttaaccaggttgataatgacagaatttgcaaattaaactaaattaaaaaatttctaaggttataacatttatactaagatctgtgattccttagaaagttaatgttttagttgggttccatttaagtagaaggttgtcagaatgtgaataaagaaataatgggaaggtatttagaagtgcatttaagaaatgacagaccaaagagaaaatgctagtttgttaataggaagagtagacattaaatgaattatttgctaagatatttacagggaaaggcaggggacagatgccagccacagacatgagtttccccagagaggaaaagaggaactatgatagcacaaaaccagatgatcaaggtattagaatgtgaagtctgagaaaagctcctggccatatggagcccatcccattactgtgaaatgaaaaaagaaagaaagaaaccttcctctctatgcttagtttccaactatacaaggcactatattaaaaggaaatgcaaatgcatttagtttagaagaaaactaaagattaatttagctatgaacaagatgatttttattgataataaaacaatgcattttacaggttataaattgaagtttatttgaaacttataaaatgacttaataaaatatactctcaatctttttgtcaccgaagtaattagattacattaccaaatagttgcccaaagaattagtgtttacatatatataaacatacatacatttatatatattttataactatatatggttataaaataatctttagtatcaaccaatataaacatctcaatgttgtatgtttccagtgaaaatgaagaataattaggattagttaaagcttgatggagttagaggatacttttgagagaaaatgttggataggaggaatacatttatcctatttcaagtactctctaaagtaggtgatttcctaagtgttttaggtcgctagtacactagtactattgtttagtagcccaagggtctacaaaactcaccaagttatgggttcagaagcaggttatgccagccgttagtccagaagttcaataaaccccacctctaggtgcttggtctaattgccattatataaattcacatctttcccttgagtagatatatttttccttttcctttactcctcttagaactacttatgtctctcttatgtaccctttccccttctagaacatctcttggggtctgtgggagtttctcatttacggtccttttgcatctccagtgtttttctccagttgcatcctagcttcctctggttgttgctcactacagccagcattggagctgtttgctggctgtagtggatgggcagctatgccagtgttcaggggcacccatcctctcgtgatcaccaaaaatctcttattaatctcactcccactgctctcagccaagtcacaggctcctacgggtccgcagagcctcctgttaaggaatgggtcacttcctattagttgctgctcgtgtcatttaggctattaccactgcctgcaggtttgtggtctgcacatgaactactcctagggaaaaaaaaaatagtcctcttgttgttattttgtttatgtagagtggtcccacagcagagttgctttggaccttattataaaatctattttatccttgcagacctctcctctcttagttttggttcacttttctagatttatctttgctttatccaatttttttttttttttttttttttttttttttttttgttgagacggagtctcgctctgtcacccaggctgagtgcagtggcacgatttcggctcactgcaagctccgcctcccgggttcacgccattctcctgcctcaacctcccgagtagctgggactataggcgcccaccaccacgcccggctaattttttgtatttttagtagagacggggtttcaccgtgttagccaggatggtctcaatctcctgacctcgtgatccgcccacctcggcctcccaaagtgctgagattacaggtgtgagccaccgcgcccagcctgctttatccaattcttattggcccctaacattttaagaaatagttctgtaaagaacacgttcaagtgtaattcagtacaatttgcaacattatgggctagacaaatataatttcaaggaattggggtgccgcactggagagctctatgaaaagagaaactgtatcccgtttatctgtgtatctcatataatggccaggatgttttttaattaatgtaacatgtttaattgataacgttagagtaagaattaaggaacactctaatcatagcaggtttgaaattgttaattgttaaaatcttattgtcaattttccctcaatgtttctttgtcacaaattaacttttgttattatttttggtgtgagttgaaagtctttggttaagaacaaatatttgtgatcaaatgtgtctgaattgggtgaaggcttgtttcatggtggccttaatcacccaagtctatttgttgcactctcttcattaagatttaagctaggctgggcgcagtggctcacgcctgtaatcccaacactttgggaggccaaggtgggcagatcacgaggtcaggagttcgagaccagcctgaccaacatggtgaaactctgtctctactaaaaatacaaaaattagccaggtgtggtggcgcgtgcctgtaattctaactactaaggaggctgaggcagtagaattgcttgaacccaggaggctgaggttgcagtgagcagagattgtgccattgcactccagactgggcaacagagcgagactacgtctcaaaagctaaatcatctgtttgaaaccctagtatgttttcagacacggagtggtatttgttcatgacctgattactctcatcaacagcataaagcttttattcagtgccatttgtgggttttcctatgctggtaattgtataaaagaaattcaattcatttcaaacatttattgagtacatgtgatgcatcaggtactatgatagatcctggggatatgaaggtgcattaaatgtggtaagagtttgctggtggtgaatcggggagagggatagtttgtttcagatggaaggaacagcatatgcagaaagcacagagtgtggaaaatacatgggctgtgtgaggtcagatgaataatcagtgcaggtaaagttaaaaagatatgcagtctgttcttccaagccatataacctaagattgtagattgcattgagaaaaacaaatctcgtgtcttatagattatttctccaaatgactcaagagaaaatgttaggtagtatatatagatgcttagttaaaacttgttcaatgacaaaaaagcattttaaaatgaaacaaaactaaaaatatgtttctgatggaagtaggaagatggtgcacatttcaaaaagtgaagtacaatgccaagacacttgtgcttagtgactaaggaaaattgtagaattattatgcaatgatcaaaggaatgaattcatgtaataccaaggatcactgtaacagttattgatataaagttaacacctggagctgccagtgctaatgaggtagctcccatcaaggatacctgtgatcagcatcttttatatgcaataaagtgctaaaacagctcctgcataagccatgaggaaaatttctattaacagaatattagtgctggaaaaggatcacatgacctaaaggtatcagcaaccttctgaatacttcacctgggacagggttaagagactattgaactagatgttttacagatgaacaaactgaggctacagaggtaaagagagttgctcaaacacacaactggctagtaacagagccagcgctaatgtccggtacagtgctcctctcctagactttgctgtccctggccagcccctttatgttacatagttagataagtagatatttatgacatcattaagtggcataagtcatttagcttcagagctataataataaaaatccatcccttttacttttagatttgagacctttctaccatatcacaccatctttcatatataagcgtttatcttccgaccaaagtgatatatgatgcaaaaataccaaatataaactggaattgctttatgcttctttctgtgaaagttaagtaatattttgagacaatttacccagtaatgtggatttctttaactttgtagacaccaaagggaccttgtgtttattataatatatatatgacataaattgtaatatatagttcaatgaagctactcagagtggggaaagtccatgagttggaactgtgccactgccctgacgtttgctgcatccactgaccccttgtctccttgactagacagtaagtcacaggatttctaggaagggtgtgtgcatgtaaagggcaattacaatacttcaggcatttcttcagtgttaacagtcatatctaaattttgattccataatatacaatgtatggtgaaatgaaatcttaattattatactgcattacaaagtttatgtttattagtacagtgtggctgtttttcttgacaaacatcaggcctgtgtcaggctgcatctgagatgattgggagacattggcctatctggcctaccacatctatatttttccagtctttctctactattgggaggttgtagaaacttgtccagcccatatgtgcgtcatttactgcagtgaaactgagctttgccccttttctagaaatctgaaagttgagatccagaaccagaagtcctcagggcaattatcaggagcaaaagcaaggaggcaagggaggagaaaaacaggaggaggaagagaagtgaagggtgagcatgccagtggaagggtctgaatgggtgctggggtgaggggtgattgatcaccttcacctttgtgcttgagtatgcctgtttcattgaaagggcaagggaggggccgagcaggcagtgaggatgaatgtggttacttagggtcctgaggagcacaggtgggaaaataattcagacctctataagtctcttctggccttagaaatagtaattctcaaacctagccgtgcctcagaagttctttgggatcagattcccaggaagatgcattctgacttcataggtcttgggacgagatcaggagagtatgtgttttaaaagcacactaaaggattctgatacacagctgatttgggctatatgcctctggaaattctttacagtactcacacaatgattaaatgattatattttaatatttaataaagactctggaatatttacaagataccacttctactttaccaaattcctttgctccatataaaggtcatacaaataagaggcaagactttactctcctattcttatatcatctggggaaaaatcacttgaaataagcatcagtggaatcaacatacagatataaaattgaaatataatctcatgcctctagtgcttaatggaaatgagtacccaccaactagactttgggcatgaataaatagaagtattgaccatcagtcagaagcaatcattataacattttataaagaatgagtgatgcttcttcagaaatgcagtacaagatatgccatttaaaggaatgcacacattattaaccttttaatagttcaagtcattagaatgtgatgttgaatattttcaggtatcaagagaagatgaatttaccacaaggcagcttattccagcacaaagagcccttgatttcaattcaagaaatctgggttctagctctcattcagctactaactagctgggtatatttttctgttttgcattaccataaaggaatatcgtgtagcttgtgaagaagaggtgtttatttggcttggagttctgcaaactgtgcaggaaacatgacaccagcatctgcttggcttctggtgaggcctcaagaagcttttatccaggtcgaaggtgaagtgggagcaggtgtgtcacatggtgagagattaaacaagagagatgtcaggctcttttaaacaactgtcttttgcataaatgcatagagcaagaactcactattgtggggagggcatcaagccattcatcagggatccaactccattaggcctcacttccaacattggagatgacatttcaatacgagatttggaggagagaaacatccaaactgttacactggctgaattgcacaacactccttagtgtcttagaaaaagagtggggctatatctccaaagtttcccaaaatcaaattttctatgatacttgtcattgtgatttagaattcttacacaggaatgggtcagattactgcagtactacagtggttggttggcagaaaatgattcagcccagtgtgctttcttctggtaaaatgctacaactgacaagatcatttctgggtttgccatttatagtctctaaatatctttaatttaaaaataacctatttttttcctggctttttgatctattaggttggcacaaaagtaattgcatttttttggcattaactactattacttttgcaccaacataattttttttgttctagatcatcttgtcacttaacaaatatatattgacacatattatgttcaagacactagcctgcttaatatgaaaaatatacccccaaggaatttagagattaatagagatgacaagaaatagacaatgcccaggaagctagagacattgctataaaatgataattataagaattcagactaggagaccttatttctactatgagtctgctttatagagatggcatctgtgttgcatactaaagttcaggaaggatttggaaatggaaatttggtggggcacagcacttcaggtagagagagatgaaagaactgtatcatgtttggagaacagtgaatgattaagtttgatgtataggacataagaagaaaatccctgggaaacaagctgaaaagatgggttggatgagtgacagtgaggctcatgggtctgccttttcaggaagaaactttctacggtcaggctatttctgggtttgttaatatcatattcctgcccgtgaggcacctttgccattagctgtgatcaccacatagtatgtgtgtgtttcctcacaccagagcttattttcaggagacttttgacatggtatcctggccttgaaacttggcctttgatatgcgatacttgatgtgaaaggttaggttcactgttcctactttgttgactgttttctttcaggccatattctggttttattaattcttagtctccttccttcagtatgttttaagatggtatgtatgaaggagaaactgatgcttgaaataaaagagaaaatgcacgtctcctgatactaagcactaacgatcctggatgttcagagcttcatgatcgtcttgctaacaatctggcacacttacagaacagtaactgcaagaagagactgtttggagaggttttactttcaataataaaccggatatactcattaattatattctaaaaccaacttttgacatggtgagaagaaaatttcaagtcatttccttcagtgtccaatgtcccctgtgctatttattatattcctctggaaaccattttgtttagctattgaaatctattaattttgtcccattggtcatatttaggcccttctataagatgtacttgctgtgttaattatttaactatcttccaacataaataatgtgtgggtttgatttcaagtgtagatgatccaggatgtgttttaaaaggctcaaattcgccatgttgcactgtataactacattaggtgtgtctgggaatggctctgagcggaattagaagtaagggaactttgttcttcatcctagacctacttttcttgtcccttccctctcctgccagtggtcttggcttctgtctctcaggaacagtttctatctgttcctttcaaaacctgcccttatatgatgctcctttaaattaattcacacaatagtttaatcaactgataactgagagttatcctttattacgtgcatttgatttaataggttataataccctaagccaaatgagtttttttttttttttaattaggtatgtttgaagtagagaggcattcctggcttattaaaatgtatccttttgacttttagatcccacagataagtgagaatatgtgatttttatctttctgtgcctggcttatttcacttaacataatgatctctagttccatccatgttgttgcaaataactggatctcatttttttttttatggctgaatagtactcccttgtgtatatgtaccaccttttctttatccattaatctgttgctggactgttaagttgcttccaaatcttagctattgtaaacagcgctacacaaaacatagtgcagatacctctcctttgatatgctgatttcctttcttttgggtatgtacccagcagtaggattgttggatcatatggtagctcaaattttagctttctgagaaacctccaaactgttctccacagcggttgtactaatttacattcccaccaattgaactcatcgatatagagagtacaaggaaggttaccagagcctgggaagggtagtgagggaatggcggggggaagtggggatggttaataggttaaaaaaaaaatagaaagaatgaataagacctattattggatagcacaacaggatgactacagtcaagaataattgtacattttaaaacaaagagtgtaattggattggttgtaacaccaaggataaatgcttgagaagatggatactccaattctccatgatgtgtttattccacgttgcatgcgtgtatcaaaacatctcatgtatttcacaaatatgtacagctactatatacccacaaaaattaatttaaaaatgaaaaatgtattctttatcctctcctatcccaaccgaaaagagccattttaaaaagttaagtatttgataaaatattctaaagctctttgttaggtatgaccttaagtttagcaaacatgcctgatattttatacctacaagattcctctttctagtttgcatttagaatgtgctttattcctcaagtgtttggatgtttctttccttacgtctaatgaaaattctgtattgctgtcaaaattcaaaaagaaccattatcatttctctgtggtagttcaggaaaatttaaattagatttgtactcttcaaaatcaaagcctgtttaggcataaacaaattacatgcaaataatgcagaaaatatcaggtgtatttattacacttggatatgacctttggaaaaataatatagtgcctggttttgttaaagaagcagtggagaactgtggctgaataaaaagtcatctatacacagtaaaagtatagtttctttaagtaattgttcatatcagaattatactcctgttctgatatgtaatgagaaaaaggtgaagaaagttagctccacaaatgtgctaaagacaaagagacaagtggcattatttcatctgcctttggttctaatcttgttaaattaggggagagaggagaataatctttaaaatgccatgtgtggaatgtcatacatgactggaatctaggttccttcaaaccaacttaatattatgataaactggaactgttgtcattgttgtcatttatgccatcactgtatttatggccaaggatgctgcattttatgctgaattacacattaccataaacaaatgacgataattttgatgcctataagaagttttattttttaatgaaaaaaagcaggcaagaagttgtaccgtttggcaagatagaattttcatgaagacaaagtatgtcattgttcatataatgtagtttggcaagtgctaagtaagggtctcagtctcaaaacaagacacccttttgacttcagcagatatgtaaaggctgttcattaccttcctacttactccttttggtagatttcacagtatgtaatgcatcagtgcagaggctctcaggataccatgcatgtaaactgtgatgactggtggagtattgggatcattagactaagtttgggttgtagaggattgggcactgcctgagtgagcttttggaggtgagtgagaaaaaggagcagggggactccaagaaggaggagtgctaacatgagacacagagaatccaaatttcatcaaatcttttaatatttagtaggactaattttaggcccagtattactaattttttcccatttgatatttagcttgtgaaaagtcaacatgtagacatttggttgggaaaaatgttatattaaaacatcattttacctcatttttctaatcatagaaacatggttctttttcctgtaatatttatgtctctggacatttttgtccctgaacatgcatgggtacaaaatcagaaagaaatgagcttaaatactgcctttgcacataggagcaaagtgatttggggcaagataaccacactgatcataattttctcatttgagaaatagagataataaccttgatgagatttttacggagcaatatgatgatatctgtacatcacctcattgagtgctggtacatggtaatgttcaaggttagctagtatcattgtcattgatactactgtctctctgctgagacattctgaaaattatttctttctagaaataagccttttggtcagacttaacaaaaatgttattttatttttaatatatttgaaaatcaggactatcaggctctgttgctttttttccacgtggtacaaatacatgcagagttgatttgattttaaataagtaaggtatgagaatcttagtcaaaccttttttatgccaagaaatgtaaagattccttatttgaatattgttgtggttctttgtataaatgcaatcattatgaaatgtacattatgacttgcttctccatggcatcttggacaagagcttttgcttactttggcagaggtctgtgtgtataagggtgtcttcaaaatgcacagctgactgatcaaagggatgctctaggatctgatgttcttgatgtaggtaagactcattattcagaaacttgataaacagaaatataaactttttaataacactaatgtaagtcatggaactgattcattatacattataaattcgtttacatatcttgtagttaattcaacattgtaaatgttatcttctattatttaatgtcctgtagtatatatctgggtaaatgtggttcttatttttttctgttactgtaatatattagattgctgcttctgtccttattttgcatatcttccttgctttaggccaaaccaatctttagattgtgtctgccaacagaattgggaagtacagttaaagaagcaaaggattacaggtcattgatctgttgcatgacaggcaaagatgcgatagaaagtaagtgatgttttagcttagtgtgttgtattcaaattagacacatgtatgtgtcttcttttcacttataaggctttggcactcatcagacagtcctatgctgggaaggggaattgtaactcctgctctcatttatctcatcatctcctagtcttgttgagaaatctactttgactttgcagatacattttcattgtatgacacagttaataattaggatttcaatttatcagaaagtaattgataaatgttgcagaacaggattacagctttcaggcacatccttctaaaggtgctcttggatactgtattgttacattttgaaactgacatctgttaatgtttctaggtaccttcgttttccatggtctttgtttttgatctcttctggtgctttccttaattattacagcaccaaattcatagtagtctctttttcaaaaaatgtttgctgactgagtatttgctcttatgtctctggaattttttaaagcacgtattgtgccattcattatctaattgatagaatgagagtatataggatggctaacttcatataggaggataacccatagttttcagagtcaagggcactcagctttgaatctcattctatcctgtactagctggaaaaaataaagtagcttcactgagcctagtcttttacacaagtaaagtaggtgtgctttctattacatgctacattctatgcagatgaagtgaaaaaaaaaaaaaccaacttactatcagtcagctcgctggcaggaaacataggacatattcaaatgggaaattgagggaagcaacaccttgtaaaagtatgggcaagtttaaaggggacctacaaggtaatatgaagtatcctggaccagcaacagtgggggatcctcgctatgcataggcctgaaggggagtgataggaatgaagtttctagaacccagaaatagtgttagggtgtaggagagtgccttctggaacggaggcctttggtagaagaatgaagctgaaccatagcctggtagggcatgagaacagggagtaaatacaataacttgacttgattcccactctcccattttctgctagggcttctgattggacaaactcagtcagaaaggaatccactaatgcaatttatagaaattagcctctagggaacagagaagggtggaactgagaggataataaacatatctagctatctatggatctatcatggacttagtgactgctacttagcatatagggtggccatataatttattgtccaaattgcaatacttttgagaacaaaaggagacaccactattaataactgcactaggacaacaggcataaagcagagctgagccaggcaaattaggcttactgttaccttactaagaccataataagcctaggtgaatatgaattgcctttccttttttaaccacttttctcagattctttcttttcttataatagtgtaatgtgagtattttgagaaagaagattggattattttaataaagcaatctagactcatacccctgtggcaggctttccaaagtcgtaattattactgagtcccttgctaacatctgccagaagagtgcaaaggatttaggttattcgttaaacttaaatcctgattatcttgtttagtagtctcccattgcttagaaacctcttttgagcactgaagacagtggaagcagcagaaagtctattaataaatgggatatacatgctttgcatgaagaaatttggtgagctatttatttttctctagccatggtctttctatttctatcttaaacccaagtacttcacatgtaggttgctttgtttttaaagatatctatgattagtatttttagtttgtgttaatattggtgattgaccaggaatggtttttaatgtcttatttcaagcaagaaataagaatactaatgaatacagggaattaatgatatcaacaaacatttcagcatagatacttgtaagttcaaagaccaaaaatattttatttaagtgaagaaatgtcagtaggattaaatggaataaagtgcatttggaacaaaggaaactctatggaaattgtagtttaccttgtatatatgtcttgactgtgattttttgacagcaaacttgagaaataaacaatcctggtgatgtctgcttatcagtgttccattttcatattgacgcatttactgcctcgtttgtgacatccctgccaacatcaataacctgctgcttccctttcctggcccactgactttttgaaagtgcttgctttgcccaactttgatgtatccatttgttcataggatcttgcactgctcctttgccattcattcagatttgaatgaagtctcctcaaggagtgacttactcctttcctctgaagacttccttttagttaacaattggtagattcacttgactgtgagtctaactgattggggtgacatatggctctctcagccctagtgtttttccaacccttttgaaagacagggtataatcctaactttccaatgagttctttttagaacttctttattttattttattttttttgagatggagttttactcttgttgcccaggctggagtgcaatggcgtgatctcagtcaccatgacctccatccacctcctgggttcaagcaattctcctccctcagccttctgagtagctgggattacaggcatgcaccagcacgtccagctaatttttgtattttttgtagagacagggtttcttcaggtttgtcaggctgctctcccattcccgacctcaggtgacccgctctcctcagcctcccaaagtgctgggatcataggcgtgagccattgtatcctgccctttctagaacttcttaatgtcacctctacaaaaacaaattaaggaatttacacaatttggtattggtaaacatgatttttttaaaaagcatatgaattataataaaatattttttgctaccaaatacaattttttaaattgaaaagtagaaatggaaaaattttaaccactgaaactgccgtataaaggtaaagcaaatatttgcaaataagctggttaactaatgtatctattcattcacaaaatactttttaagtcctgttatcaccagatgttccaggcataggggtacaatggtgagtaagataggcatgttctctaatctaatggagtttaaattttaaatagggaagacaagcaatgaacaactacaacacaagtaaacagtttataaaccatcagagactatcaagtgctatgtgaagaatgctgttatggagtcacagagttgctgccttctaggttagggaaagtcttttgaaggaggtgactgttaagctaatgtctgagtgacaaggggcactagtcaagcaatgatctggggagatacttttctagtctgtaggaatctccagcacaagggggctggggctagaaccagcttggcaggttctaggcaccagaagatggtcagggaggttggagtgagcagagaggagagtgctatgagatggcagggagggcttactagattctgttgggctttgtaaaccaggataaagagttcagattttattctttgttctctggaatataattgaagtgtgttatataaggaagtgaaatgatttgatgaacatatttagaagatcactcggacagctgagtgaagaattaaccacacacgtaagccagaaaggaggcttgaagattattgaaaagctattgcaccaccagtgatagatagtggtggctgacaataaggtagtggtgacagcactggagagaaataggcagaatggggtcaagttttgctttgttggatgtttgactttagaaagcagtctataggaatataatagttggtgactagaatcaaaggattgtttgtttctttttaacagaacaagacttcctaggtaagaactcagaagggacttatatgtgctctagctatactacttttttcctgtttagttttcttggcctattatctggaaaagtgctactcaacctttctcataaaatattatgggaaaagtctccatagttgcctctcaacctgtccatattgactgggtgctttgtgttagtctaactcccagtatcctttgtgtacacaattgtaattcatacatttttgtgctatttagaaaagggtgatggtaacttctaaagccgagttgaaagaagcatgatagaaagggatgctgtgtgtaagtaggttgttaggtagatgaaatgacccatgctgaatgaatgtgacaaggaagaaggggatttgaacgaatcacccttagacaaaacaccgcctgtaagtgattctaaggatgcattacagaagcccgttacaagtaagtgaagtcttcctacaagcccacagctgatatcttgattaaatatttagaaggagctcttaggaaaatagaaaaaagaggcaagtgaaggggcaaggaggaaaaatttagagtggaaatggaacttaagcagagtcaaagcaagaagaagggagagtctcattctccatttgcttcaaaaacaaaaaccaagaaacaacccccgccgccaaaacaaaaacaaaaacaaaaaaaacaaacctcagtctgtgaacaaagcccaggtcaatatttggtagtaagaacattgactttagagtcaggcaggcctgagtttgaatccacattccaagttacatgtgtgtccttctgtgcgtaagagagggatgcttatacacagcatcccttcctatcatgcttctttcaacacagaattgcctttgagtctcaattttttcatatagaaaatggagttgtaatgtctaaatcatagtgaccctagaaaacatttaatgagatggctgtatttgactctaactcctgtctgtttatctaagtgtctttggcaaaagacttaatcttttaaaactttgtttcctcatctctaaggcaggactaatatctatgtcacaagattgttgtctaatacattatcattaagtgttattatttttgaaggttcattgtttaaaatctcagaccagaaaaggcaatcaataaatattttttcctttgttattttcttttcttcaagtcttgtatattattactgttcatcttccattacagaaaatcactcccgtacacaatgtttataagttggttttcaagtttgcttaaataagtacatacttgctttgaactatttttctcctgggatctctgcataatttttttcctctcagtttggtgtaattactaatggcttctcttttcactctaaaagtgtcccagtttggacaacaaattatgtcatcaccccacttatggtttctattacttatgtaatcatccaatgtataatttaaaatatatatcttttaattttatgaagaaagagtcatgtcaggatgacatttgtaaaacagttttctgaaacaaagcagtatcttgtttactgaatatgcaatgaacgaatccactggcaagccctgattgattaggacactcatgatgatctgtcactcctggaacatgctggggcagaccagttacattcttgtggatcatttcctcaagctgcatgtcatgaaagtgctcatgatgttagaatgcaatccactctttcctaagtgcaggtgcgtggtggtctctgagattcagatgcccctatgtgcattggttgagttgtcccttgacacccatgtcagggatgcttgtaaaagcaacatgactgtctttagggaaaatgaatttttgaagtctcaacagaaagtatagctcagtgcttttgggggaaccacagggatgacattttttgggaatggtgatttcatttctcaacttggtcatatggtagagaaaaaaaaggctcttttaaaagtatagtctggacattgccctagtaccacatcagattggaaaactatgaaactttgaattcttaatatttcatttctccttaaacgggttataataacacatctatttttttcatatttgattcatcatttgattgatttttatatgttctagcaggaaaggagctaaaaaattcatagtattataattaacaaatgtcaagtacctttacaatttatctcattctactttctatgccaacctctttcctatcacaatataactagaaattcatataaaacagtccacatgaaatagcatctgctttcagctggctttctaacttctcagagttagatacatgaaaaaaagttgaagaaaatgagaagagagtaaaaaataactgttaaattaagtttaaaatgaatacttcagggcaggatttgggattctgtggataattcagtctacctaggaaagaaaatctctaaatacattattattttaaaaccaagtattagagggtttagacttttaaaagcattggatataattttggatgtctggcagaactaggatatcaacttttattaaaacagtccttttaggaaaaaacatgaaatattcattgctgatattattccaaattttcttctatattaaatctggaattagaatagggtacttttaatttttataatggtaggtacattgtgctgtaataatattagctccaatttaaggtcttggcggatgctaggtctttgaagtttactgtctcatgtaatcctccccaccttcttaagagttagggttatcttcatagcacaggtggcgaaactgaggttactaacttggtcaaagccacacaattagtgattgatggagccagttttcaatgctagaacttgctcttttaccatgttacagaatgtagtttgtttacaagagttattatgttttttttcctagatgtcatcataactttagtggaagtcacaatttactgcaatcataatgtttgctaaacacctctttatcccttacttatcagattgccatcattagccttaactacattgctatttatatgacctttaccttctacttttctatggttaagtagatatgaaccatttcagccttctttgttaaggaattttggatatttcttggttctggtcttccaacttaacttctaatatactaagtattttgtgccatagttaaacgtttactaccattgacaagaactgtcagcactcaaaacttttttataaagaaaaaatagcctacaaatgttaagattcagattgttgaattttaatcaataggaagctttgcttaccctctgcagtgaaattttctaactgagattaaacgtggttcctattctcagctgtgccccagtgaatgttcatggagtcattgtattgtttcttaatttcttctttttaaaaatattgatgtactccttaaaactgaaagaaaataacaccatgtgtccagggatttggaagcatagtctgaagtaacttctaatagcataaagtttcaagttttgtttcatattaaaaattcatgtgtgcactgtaacttgtatattcttatctctgatataaatatattgtctaaaatactttcacataaaactggtatttcaggaagacgtgctacattttcctctggtatgaactgttttggaaaactaacttacgttttctggtggcacacatagtctagtttgaaaatcatgaagctaaagaattttctccaggaaatcctattagaaaaaggagccactcatccatttattcattcaacagatattctttcctgaattcactctaatgactatggggacattgggcacaggctaatgactaatttcatcaaggttcttgctttcatgggtcttacattctgaggaggagtattactaaataactaagtaagccagaaaatgccatatgacaatattaggatgaaaataaagcaagatattgtgattggaataaacatggactttttcggatcccataggttgagaaagatctctctggggatataactttttaaacggacacctgaatgataggcaaaagtcagtcatacaaatatatgttgcagtaatttccaggcatatagttccagcatagagcaaaagtcttagggctgaaatgagtgtgactttgtcttttatcagaaagaaggcaagttgtatagagagagtagaataaaagtgaggcctgtagtcccagctactcgggaggctgaggcaggagaatggcgtgaacccgtgagacggagcttgcggtgagccgagatcttgccactgcactccagcctgggtgacagagcaagactccctctcaaaaaaaaaaaaaaaaagtgaggccgggcacagtagctcatgcctattatcccagcactttgggaggctgaggtggatggatcacttgaggccaggagtttgaggccaggaatttgacaccagtctggtcaacatggcaaaaccctgtctctactaaaaatacaaaaattagctgggtgtggtggtgggcgcctgtgatcccagctactaaggaggctaaggcaggagaatcacttgagccagggaggcagagtttgcagtgagctgagattgtgccactgcactccagtctgggtgacagggaaagattctgtttcaaaaaaaaaaaaaaaaaaaaaaagtgaatgatgaagtgaggggaccagattgtcaaataccttgtagactgtggtgccaagagtttgggctccattctcagtgtgaaagatgccagttgggggtttgaaatgggaaagtgacatgatctggcttatccttttaaaaggtcactgtggatgctgcatggataatggattataagggtaagaatagaagtagtgtgaccagttaggtgtcctatgaaatggtacaggtgagagatgatagtggctcagactgcaatagtagccatggctgctattagtggtatattttagaagtagacagaagactcactcattgtttagacagactgaagtgctggggtaaggagaagagtattgtcagagattttaacctgaacaacttggtgtgtctctttttttgtaattgagattttattggttgtgtgataattagtatatacatttcaatttgtacaccattgatgagatggggaggatcatgatttgaggagaatgaacaaagtatctgttatggaaaatgcttactcaatatttaggtgaagaagtcaggtaggatacagaagccagagaaagtctcaggcaaacatgttccagagagcgagaaaactgtaagtacagaggctagaataagcttgatgaattttaggaccggcaagagagccagtgtgtttggagagtggagcaagagagacacactggtagaacagagatcacagagatgactcctataggcaggatcatttatggcctgaaggtcatgcaagataatttggattgcattctaagtgtggcaggaaatcattggtggatttaacccaagtaaaatggcctgatcaacatttgtaaagtgatcactttggttgttatatgaagaaccaacggggaaaggacagtgcagagagcaagagtagaagagggagataaaaagcttactaggaggctttcggagtcagaaatactggacgtcttacaatgtatggctgagttctgtaccatgacaaacatttacaccaatattccatgtgttgtttgaatactcaactgaagattcatggaggtaataaacctattttcaattctataatatatataaatacaaaccatttttgcatagttttattgtacactaagtttttcaggaatacaattattgcacatattgaagaaaatgttgtacttgtttcgttcagaactataacaataactattcaccattttataaaatcaagtcattgatggtaatgccacccctggtatttaaattggtgtggccaatatctcataccagtatatatctgtgtttgtaattgctatcttattgattgctctatgtataggtataagcaactgatttcaacatgtcttgtagcatagtagtatctacgcatttacatattgaaagacatcttatggggtactatactgattttttgtagtgtatataggttacagtatctatgaattttatttcagagtgataaactattgctatatgaaggaggctattagagtgataagttgagaaccacagatctatataattatggataatctggaatcttaagtttatggttatgaccagtttaggctagatgaaattagaattggtagtctcttatatcaatgtaattttcccaggaacacatagctaatcagccacttgtgctagttttgaatttagcccagagtgtctctaaagcccatattcattaccattataccattatatcagggtaaaaatttattttcagaagtttattcattgtagtagagtatgctgcttaaattcttggtgcaaagaaaatgttttaaagctgtgtctctattagcaataaaataaatttgttgattcagccaatttagtgatacaaataattacatttggaggattagaacagatcaaatttttttggtccattatatgatgaacaaaatctgattgtggtttcttttcactcagatccagttgttgagatatcttacagaaaaggctaggttttctcatttttcattttaaacgtgaaaacaggttcctatttgtttctaattatcttctcttatcacaaacttgcctcatacttggttagataaatgcttcaggactatcacaatggaaaacatacatacttttattttaagattttaaaactactaattgtttattagaaaagatcttcagtttttatctctgattttccctttgcaaattcacatagtgaaatgttctttttggtgtcaatgttttatctcatcaagtaccaacaatattattattctgcagaagaatagctaagaaggaattaacttggcagtaattctcataaaaaagtaattttgaacagatatgacagttttgtgagccattgtccaactatcaccaaagcattttaatttgaacgttaaaagaatttgcaacagttaagaaagatagttgctagggaataatatatcaacacattgtgtactatatcaaagagttttttgatagggttttgatgatggggaaaatacaagttaaaataatctgtcttccgtttgggccactttgcattggaaattgatgtggttttaaaagattgatttttaacgtttcctttttattgtggggcaatccacaatatcatggaggatttcttaatcttcatgttgcaccttgctcttcatggtgatttgtgctgtctttgtcttatggatagaaagggaagatccacttactatgtggaagatatagaagaaattaattacactgcctgtggttattatcttcacagaatcaaattacttggtttaggaaatatttcatgtgttaaaaatccagtgtgaaccagagatactgcacctcaaccaaatgaatggtgaaacctgaagataaattttcttttcattactctgcctgtgaaaggcagcagagcacatgtttaaaagctctccagtgaggcacctgagagaaactgtcatcgtttctttaccaaattgaattgtaaactcttcctatttaggatcgtttatgagcagtttgaatgttatttaacaagcataatgttgtggagtagtgttacatattgcctaagaaggaggtttctattacttctatttatcttttgcatcagtgtttgacaggtaacagatgaaattccttttctaaaattaaatcaggcttcatttctgtctttcatccattaaatcaggcttcatttctgtctttcacccataaaggatgaaacatcatttgcttcttagacagttcctgtactctatcatctttcattacttttataagttctgtcataaatgctttacctctttggccttggcttctaacggcctattatagagataagtgtctgggtttgataatataaaaaccttagatgttgctttaccctcaattaaaaagtactttaaaagcagcattagagtacaatgtggtctttcacttttttattatatttgccttcttaaatagttttcgttctttatgaccatgaagagcagtgtttgcagagaatttggggtagctccctttactgaagtccatagctgtacacctgccttctggacatctttacctggttatcccacagcaccttaaatttagcctgatcactgttccttcccatgttttctctattacagaaattggcaaatgatggtctctgggctcaatctagtccactgcttgtttttgcatggccttgtaaagtgagaatatttttatatctttaaatggttgaaataaaataaaaagagtaatatttcatgatatgtgaaatttagatgaagttaaaatttctttgtctataaataatgcttttttggaacacagccacacttggaaagtttcaccactctctcaactcctaatcttaaaaccactgaatcaccttccaacctttccttttattcatattcatattctgttaatgtatataaggcatatctccaaggccaaacttctctttactgtaacctttatctcttgcctggacgattgcaatagttttccataactcctgcttctcttcaataaaatgtaattctataatggtatcagaattatcatctcatgagcattaataaattagatcatttttctcccatgttaaagatgtcattgggatccttctttccatagaacccagtccaaactccttagcactgtaacaaattctttcattcattggccctgattctttttctagtctcatctcctgtggctgcctgttccctcctcttgcacctcttgcatcttaaattcctacaagacagtacttcttattgttctcccccaatatgttgatttctttcaagattctctgccttcgtaatgcggctgtcttatctttattccccttttactactttttacatagcaaacttgatttaagtttttgagattcagcttaaatgtcacatttaagaatccttttcaagggctttcaggtaaaattaagtgttctcccactgaatttctgcacttgtgttttaatcatctatgtagaagttggagctcttccccattttgtatcctcagaacctagcatttgttacaaagatagtcagtaaatatttgttggctgaataagtgctcatttactttagaaagattcttcagtttaattcagcagaaccaaaattctaaaaataataacaatcaagtctattattctatatggtctggaatgaacctctgaatctttgtgggtgattatctaaaagtctctgataagcatctagaacagtcttccttatttaattctgtggtttcctaacttgcaaatttattgaataaaatgtaccaatttatctgttaactatttgcttcccaaataattattcatgatcccaattaaagaaaaaaaaaaaagccctccgtattctaacttttgttgtctgtgttatgttgatttagttttaatcaatgaattaattatttctataggcaatagttaaattttcaaattcagctttttctggtgctttttggtatctcaaagattagaatggcaagaagatcaggtcatgtagaaatagtacatggctctatcacctcaaacttttatgcaaattatcctagctggatcattacatattgcatacatgtattgaaacatcacactgtaccccataaatatgtacaatgattgtgtaaataataaaataaaacttaaaaaaattatgtgttatgtttcacttattcaaacccgatatttatttgaggaattagctaagcttctgatgtcctatcattccccatgctctgtccttggattcacattactgcttgttagcatatccatgggaggctagtcatgggccttactgaactattatatatgtgccttacatagactggttggatgggaaagaatataaaaccatctaaataaagattttaagattatctatgagtttcattcttctattattttcctggctccatttagtgtggacaataatggtgagacaaacttataattatatagttctttatacttatttaaagtgctttcacctacattatgcctcctgctaggaaggcataggtggtactgttacagagatttttcaagtgaaatggatgctcaggaaaatgaaattactttctaaaactcttacagttagagatgtgataagagtaaaacttagttcctgactccatgaaacttttctgattttttcttcatataaaatatgtgctcattatccaactattgcctctgggctctaaaactacccttccatactctgatctgtggtacagggataggatttgcagggtcctgctctccttcattagatggcctcctgttagtttctgccaatagagggcacatgaggaggctagacattgctggaggaagagagggattttacctctccctttttgctgctgtttctgtcagcatatccctagtaattgaagttgaatggaaacttatcttggccttccccaaatcagcctcatcatacttccttagagctaccagcatccacaaagcagtgcctcttctcagaggttcaagtcccagcccctcctgtgaacttctagattctgatcgctaccacacctctcatatttctcaatacttagtcatggtagctgctttctgcaattattacgtctgtgctactttagtgttccattcatgctttctcagtcccctaatttaatacctgtgaaatcacttccctaagttatatgcacgctattgaaatacctggtttggtttttgttttcctgaaaaaatcctgcataatggtatgcttgttatcaggagtagtcacagaaaatatactctgggattaggtgatattctggggttggtttggttatgtatttgtctttgtcttggaagcagtactgatttttttttgcttatagtatgcagtggcgctcaattaaattattatctatggttgattgaaatgaagtgtctgctgaagcaagttgttggagggattaaatgggtgggatagctttttatgacttcactgaggagctttcgaaaaagaaaagggcaaactcctttctttaaacccttgtttcaaatcactgttagataatcagagagctttcatagcatccctgaaagattttattccttattattgcgggccaacccactagaaagagacataaaattacaccaccctccctttgttcaattatttcacctggggaacttgcagtacaaagggatgtttttgtttccaaaccccttcctattacttccagacccagaactagaatcagatatcagaatactccagaggaagaatgaagtctgacccaggataagataacttatattctagaatgaatgaaaaattttgctaatttatatcaaaagtttcaagggttttagactaaggaggagatatgtaatgatatatatatagcataaggttaaacttactgctatggttaaattggcagaaatttgtgatttcatgttttagtttgtttagtattttagttccagctctctgctgaaagtggttgtaaaaatttatctggttagtaactgaaactttgactcagtggtagcctaaattcaatgaggttgaaatcctagaacttctgtggcatactatgaaggaaggaataaaagagcatatggaggtaggtaggtattttggagtagatttattccatgtgtcttgcacaatcgattctctccatgccatcaccaccacacgagacactgtattctcagagagatcccaaaggacattcttttaacttaagcattgagaaatacattgacaaatagaatgccccagaagtcactctcttctataagccagagatgatggtgggagatgctgccaatgagatagcttcctgaattcactggggtttctggaattctacaggggcaaggtaattccaagtggtaatgcctagcctttagaattaaggggagaccattagtagaaggcaggagtagccaattagcatggagcatttttattatctgcatggattttttggttatagataattatggtattcataaaagcaaatatataaacacttttctaaaatatcacttaatctgtaaaaaaaaaaagataaaattgtaggtctggtggccaggaacttgacttgcatcaccacagtgaagggtcctggcctctcactgagttcgtaggttaagtcagctttcagaactggaggcaaaatcctcctaaaggtgaatcctaaagtactttcacaagtatatataaaatcttccttcaagttctgcccaaaaggacctgcaaccactaactagggtgactatgcacttgggagagagaaatgcccaaaatatatagggattagtaaatgttgtgtctaaatttatactaattcatggacccaaaatgctactgcagtccactagtcaaagtggagattgtgcttgtcctgacacagagccaggactagggtaaagcaagccaggcatgtagggcatacaaaattgtagactgcactcacaggtttatgcaagtgctgagtcttcctgaagtctcaatcctgaattaacaaatggagttttgcacacagtttatccccttagtgggtccatggacccatattgaaattacttctctggcatctgtgtgaataattgcaacacactcaaacggcaactgtcaggttccatacatttatccctgattcatgaagtgaaagtttttctggcaggatgggacatgggtaaacttctggaacttttcatccctgccaggacggtgaacctaaagtagtactgcaaccctagagaaactgcagattagtgccaccaccaaaagcttgaaatatgcaggggtggtggtttccattatgtcctcattttatttccttggtcgtattttgaagaagatatatgtatcttaaagaattactgtggattatcttaaatgtaatcaggcattgattccagttgcagctgtggtcccatatgcggtttctttattgaagcaaatcaacgtagccctttggacgtggtgcacagtaattgatctgggcaatagttttgtctctatgactattgcaaagatcaccagcagcagtgtgcttttacctagcaagatcatcagtgtatctttaaagtcttacctcagggctatgtcaacatttctctctgccataattcagtcctcaaagattatggtggcacaaatcttggttagcttatttggctttgggggacaacataaaccacatttctttgttgctccactgtgtctactgagtaactgaaaaggcatctcatagaaggaaaagcctctgcagctagtaacactgcagtgcaaactactcttctacataggcctagtgtcccagtagacataataatatttgatgtatctggaaatggagatacttgtggaacttcttaaaaacccttataggagaattagggttatagtctctatggtttggagaaaagctatgtcaacttctgcagttaactaacctcttttcaaaaaatggttcctgcaaagctatcaggccttggtagcattggaatacccgaacatggatcatcaagtaaccgtgcaattttagctgccatcataaactatttgattgggcatgtgtgcaacaatttatcatgtgtggaagaatatgttagagaccaggcttaagcagattcagaaggcacaagcaggtgtctcaaacttttactacatataatccttctgcattacctctcctccctcaatgcataactaagccctcatgggggaatttcttaggaatagttgagtgccaagagaaaaactcgattgaggtacttgagtgatccgtttgaaatggtcagagtgtgaagatgttgcattctatgtaaatgttcaacaaaggcactgccagagaacaggctcagaacaaccatgtggaatagaagacccatcctctggttgtcagttggcctctctcctcagccattctcattccgactcaatgggttcatggtcatggtggccatggaagcaaaactagacactattcctgggctcaacaacacgaatattcccttaccaagactggtccaattgctgccagtcctgagtgactaatctgacagttgtagaggctaaggctgtgtcctctgtgggtaccccattgaagagggaggaggagtccctcttaggagcagattgactgtattagacagatttgttttcattgtctaaaaaatgtttttgagatgcagaatggtgagagtgagaagggggtgagtgatgagaaattaatgggtacaatatatatttttcacacgatgaatacacgaaaattgcagacttcaccagtacacaatatatccatgtaacaaaattgcacatgtgctccataaatttatagaaattaaaaaacaaaaatattttaatatgttttaatgattattgactatattagtttgacttttactatttaagctagaaacctgtatccttgacttccatctttaatttgctctctagcacttcacactcactccacccaatatttcttataattacaaggaatttatttggcatttgtaaacacattatgctttttaagcttctagcaggcccagcttttctattctacctggccaaaataatattcagtattcaagacccatcttaaatatcacatcctttaattcctgacaacatttcctatgtatttacagcataatatttctcaggctattattaagacatgttataagtgcatgtttaccccatctaaatagtatgttccacaaggagttgccaatgctattattgcatcctgtccttctgcttccaactcaatgactattatattgttggttctcagtatgtattaatgagtgaatggaatatggtgctttccactttgtttctgcttttaccattacattgaatggcaatgagtatatatatatatactcatcatctcatacagatccatcaggatctgtaggtcagtttgaataatgatagtaaagcagtaagacatatgagagatgagcattggtctaatattcaaaggcctaactctaggatttgctagctgtgtgaccttgagaaagtcacttaacctccctgagctttgatttcttctcttctaaaactaggcctcttttaactttgtaattctactgcttaattactcacttcaaaaaaagaaataaattgtattattggaacaattaacttttagaatttccctttcttattctttattttcatatagtttaattacttaaataatgcagataaaagcttttttttcttttgaaaatgatcaatgcttaaaactttgctaggatacaaaacataaatctttaaataatttaatatgcactcatatatatgaatatgcaaattttaaatggaattaatttgaagctgaaaatatttataacatgctgttacaaaggattcatcctacatttggaatcactatagtgacaaagagccaaatcatggtctataaagaattcttaattcttttcttcactcagaaaaatgatcaaacatgaggaacctgatgtctgttagttaattcattcaactgacatgaaggaagatatgtttttccccctttgcttatctaggtgttctaaattttgtcattcggtcaaaatagattaagagatatgtgtacctagaatgcatgtttttcttttcttttttatttttttaaatttttttggttttgagatggagttttgctcttgttgctcaggctacagtacaatggcacgatctcagctcactgcaacctcatcctcctgggttcaagtgattctcttgccttagcctcccgtgtagctgggattacaggcacctgccaccatgcctggctaattttttgtatttttagtagagatggggtttcatcatgttggtcaggctggtctgtaactcctgatctcaggtgatttgcctgcctcggcctcccaaaatgctgggattacaggtgtgagccaccatgcctgcctagaatatgtgtttctctatatccaccccatacaattttttttttacagaattgcatttactgaattggtggtatgctattatcatactatgaagaatgctataaggaaattatgaaattcacttttgatggattgttagcaagaacatccttgatattctctatatcttgctactcaacatgtgttccatgacgagcaatgccgacaatacccaagagcttattaaaaattcagagccacaggccctacctgtagatgaactgagtcagaatctgcattttaaccagaggctgaggtgatccatatgcacactgaagtgagagaagcactggacaccatgaccaaatagtgtcctttttatgagattcctcataaaattggcttatgataaagtttatttatcttaaaatagtaattatatgatatgacagtatacataattaagaaaaaaactgtgcttctccaaataagagtatttgttattgttttcaatcttttgaacactgttgattgttggttgatctcatttccctatctgctttggcagtgtgtgctaccacttttgagtactgtatggtagtcctctttgaaagtacttttcttacccttttatttgttgatttgtatgtcattcacatgctccctttgccttgataccttcagtttttaaaattgttaaatggtgtattaggtgctttgaattcttggtgggatgagtataaagaaataaaaccaaaataaagagcctaaatatttccaggatttgttatataacttgagcattgcaaacctactctttcctctttgccacctacctctctgtaacatcataattaatgttcattatgaagatttttgaggcactctgggggttacagttatcagagaagtattaattatactcagcacactatactgtacttactgagccagaaacatggactaatatgttttataaagaatttaaacaagggtggaaaacccaaaagatttctgactaaatcagaacattcacttcaattaaaacattccattttatgagaacactggtgaatatgagtctgttaagtctttatagataaattatttttctagtccttttttaaaaccaaagtacaatgattttctaagaatctagaaattatttacatcaaatttgtactgttaaaacaagtttcaggtaaattctgagctaatgttaggctatatatctttaccagcaggcagccaagtagttgaacttactgcctcaggaatccattgaaccaatagtggctgaataattttatgaccagtaataaggctcacaagttatacatgctaagagaggggtaatcaaatcttatgcttcagggcataaattaatcactgcaggggtcagaaaagaatctcctttgccctatgaacagaattgaataattaggcagtatctgtattgatactgttttaaagccttgttcttaagcatcagaattggttttaagaacaattttgtgacttcgtgggggtgtttgagctcttgattagaagaggaggggtcctgcaagttgagcagtttattctggcagacagaaaggttgggcagcttcctgattccacactgttcaacctgattttcattaaaagctcaaagtccctgctgttaaaatgtctccaggcagctggggcaaatgggcctccttgcctatctggaaatcttgtggtgggttttcatcttttaatcaattcttccatgagggaggagggatagtttactaatgtgcgaggtttgttctctgtcttctgcaactcatattttacattttaaagaagcatttttctggattgaggaattaagccttgagtactttttcaggaaaacaagatcaaggggaaacatgataatcaaatgacattgaaggccaaaatcaactgccaaactcataaatcttttcaggtttttctacatggttgttgaacaaagcatgtcaactgttacgttttttgttttttttttttttttttttttttttgagacggagtctcgctctgtcgcccaggccggactgcggactgcagtggcgcaatctcggctcactgcaagctccgcttcccgggttcacgccattctcctgcctcagcctccccagtagctgggactacaggcgcccgccaccgcgcccggctaattttttgtatttttagtagagacggggtttcaccgtgttagccaggatggtctcgatctcctgacctcatgatccacccgcctcggcctcccaaagtgctgggactacaggcgtgagccaccgcgcccggccgttacggttttatgataacacaaggatactgtattccatggaaagtagattttatttcctacatctttctgctatagctctatcctcagcagttttaaatttagatatggcaacataactttcaagttatctccctggagtattcctactaaaaggaaaactaaagggtgaaccatttccaagtaatgactgcctacgagtggcctagattctcaatacacctggagaagaaaacaaagactttacggacatacttattttttgaccccattggccttctagatgtttgtatatttggttctctttgttcttactttgttttctttttgaagtcagtaacatattgttaggctagtccagcatgggttagacatatttatttttgatgtaaaatagtatatttttttcatgaaaggatttactatatcctttctagaggcctaacactgaggcaggcatgtaagttaaaataaaggcagcaagttttctctttggaagctcataatctggtttggaaacataggccatagccggaaaacacagttaagtcatgttacaagcagtcaggttaagtgtcagaataatggtgtcaacatgggctggcacaatttatggaaggagtgaggctgctctgggtactgaagagtatgcatgctttttttggggtatgggaagaaagctatcacttgggagcatgagtgtgtgcatgtaggggtgtgtatgcatacatatgtatgtgaggggatggagatgctgcagaatgaacaaggacttgaattcaagaaggaactgaaggtaaacagggtcatgtaaatggaaggaagcctgacctctgaggaactgaatgccagggtaagcgatattctaaagagattataaagccattgttgaaagcaaattttgggaaggatatggttacaatagggaagctgggatagaacaggaaagggccagggtcaggaattctgactagaatgccatccagttgtgaggcaattatgttcacattatctgccattcacttgggtttcacaactagaaattcttcttgatcagcttggctttttatttcctctgaaagctcaaggttgttctttgccaaaagagagtcgagaagtggagcttgatttcactgacatgtgctaatgtgactacagcactggtatagactcttaggagctagattcaagcatctttatgtttagatcaaaaacgaacacaagtatgtgcccctaaatcagtgttgaactcggtatgtttaatttcaggatcagttttctttatgttatttttttccaaccaggtatccaatattttttacaaggccattctcttgaattaaatatacattagatatctcatctagataataaatctttgtgtcagcacctatcctgatctcaccagatttcattttgcagcatttccctgatgcttagcaaagtaaatcaactgctttgacaaatgagtagcttaaactccttcaaaaagtcagtcaatagtgcccaccgaatgaaaattcttccctctgtgtcttgggaatacaaaaagaactggatgactagtctccactcctcataagatttcaatcgaatgagaaaaagaaaaagcacagactaagcattaaatgaaaacataaaaaatcctagaataataacatctctgcatcaaataattactgtgtaccaaaaactttacaagcattatctcattgacttcttatgtcagccccatgggttgtgttatcagcatgaataattttgcagatgaggaatatgaaactcagagaggttagcctccttgctcatggtcacacatctagtaaattgcagagtcagaattcgaactcttatttatctctttcctcttgctgcttttaggatcctttctttactcctgacctttgacagtttggttataaaatgcattgaggtagtcttctttgggttaaatctgcttggtattcggtaactttcttgtacttgaatattgatatctttctctaggtttggaaagtttattattccttagaataagctttttacccccctctctctctacctcctctttaaagccataactcttatatttgccattttgtggctattttctagataggctttctattttctacaagaagctttcttgtaggcatgcttcattcttttttattcttttttcttttgtctcctctgactgtatattttcaaatagcctatcttcaagctcaccaatcctttattctgtttgatcaattctgctattaagagactctgatgtgttctttagtatatcagttgcactttcaactccagaatttctgctcgattcttcttatttatttctatttctttgctaaatttatctgataggattccgaattccttctctgtgttatcttgaatttctctgcatttcctccaaaaaaactcttttgaattctctttgtgaaaggtcacatatctctgtctttctggattgctccctggtgccttagtttgtttggtgacatcatgttttcctggatggtcttgatgcttgcagatttttttttttttgctacctgggcattgaagactgaaatatatattgtagtctttgcaaccttggcttgtttttacccgtccttcttgggaagcctttccaggtattcaaagagacttgtgtgctgtgatctaagtttttggtcactgcagccatatctgcattagggagtaccccaagtgcaataacactgtagttcttgcagatttacagagttatcaccttggtggtcttggataagatccagaagaattctctggattaccaggcagagattcgtgttctcttcccgtaatttctcccaagctaatggagtctctctttctgttctgagctgcctggagcttgggaaggggtgaacacaagcactcctttggccaccaccactggaactgcacagggtcaaacctgaagccagcacagcactgagtcttgctcaaggccccggcaaccactgtttggctactgccttgaatactaaaagacctagggctctacaatttacaattagcaagtgtcaaagccaaacaaggccctgggtgggttcagaaatgcagtctaggatccagggtctagagtgtgaaatcttttaaacctacctggtgccctaaactactgcagctgagctggtactgaaaccactacacaaagtctttcccactcttcccttccctttctcctgggagaggagcctcttcctgtgtccatcaccaccataggcccatggagagtattgccaggctaccactggtattcacttaaggcccaagggctctttactcggcttgtggtggatgctgacagacctgggactgactcacccttcagggaagtatgcttccctctggcccaggataggtccagagatgccattcaagagccaaggcctggaactgggtacccaggaccctgcttagtgctcttccccactgtggctgagttggtgtctaagcttaagacaaagtcccctttacttttccctctacttttctcaagcagaaggggtgtttccatagccaccacagatgttaatgtgctgggtcacacatgaagccagcatatatctgtgtctcgcccaatgcccacagtatgtactacctggttactgctgctggttattcagggcccaagggccctttattcagcagaggatgaattttgccaggactgggtctttcccttcaaggcagcaggttcctttctggcctaggttgtatctagaaatgtcatcgggtagcaagggcctggaattggggcctcacaactctgcctggtgccaaatcacactgtggctgagctggtatccaagttgcatgacaaagtcctctttactcttccctcccctctcctaaagtaggaaagagggatctcttttggaacttggagctgccctgcctggggttgggggatgggtggcacaagcactcccttagcttccctggttggtgtctcattaggtcacatgcccctaagttcattggctctgagcccagcacagcactaggacttgcctaggagttgcagtccttgtggtttagacagcctttcaagtttatttaggatcccagagcactttagtctgtggtggtgaggcttgctgaaactcaagttctgattgctgcaataggcaattcccctctggctatggctggtccaaatgccccctctgtgggtgctggccaagttctgtctagctttggcagcactgtgttccaatgcaaagttccacaatcactacactctccctcccgcaggtgcccaggttctctctccataccacatggcgaactgctgtgaggggatggggtaagggtggcatcaaaatttgagattgtctttcttattctcttcagtgcctctttcagtgatatgaagttgaaaccagatactggtttttggttcttctgaaggtgcttttattgtgtagatagttgttaaatttggtgttcctgcagggaggacaattgggtgtcaggaggaggcttctattcggccatcttgctctacttccccagaatctgaactcttggctcttgaatttttcagccagatctcctttcaggttgctataatcagttataaaaaggcaaaaatgccaaagttattgtttcttaattaaaaataaaatgatttgggaaggttacacagagtctgacttaggagccactagggttgtggagaaaacacacgggttagataagagtcttcaagagaaaattccaggtgagggaaatggcaggcttgtaattacaatgcaaaagactacgggtgtgggacagcaaacaggaccagtgagttgacgtgagagatgaagggagaggtgtccccaaattaagagcattataagaagttgaaatcctgacttgaaatcttagtgctggacacataaaacattatatgtgtgtgtttgtgtgtgtatatttacatatacatatatatataaatgtattagcagttgtcaatgcatatatatgaatatacatatatgtgtacatatatgtatatttacaatggtgggttgtaggtgctgagcactaatgtgagtttcacatggcaaaaacaaaagagggacagcagataaggtgaaaaagccagcatctttgggtattaagaaacccagaaccacaggacttaaattatccttaaaactccttatggcagtaaaggaatgtgagcgtcagaataaatttcatacctaaaaatttcacatcttactcttttttatattacactcctcaaaacttcagaaagtcctcccatatcatctcccctttaaggtggccctgactatagctttaatctgcaattctttgtataaaaagttctaggaaatggagtttagccaatataattttcccaaaccttggaccatgggattaggattaatcgaggagaaaaacggcaccaatattgtttgcatgagattataaaatgtcagtgtgacaaaattttttgtttagaaaatttataactaaatttattaagtacagatttttatccaatttattgtatcagacagcaataattcaaaagaattccacctctgcattaccaaagggcaaatataaaagataagaaaaatttaaacttgtgaaaaatatgtttctgtacttttcattgcctttcaaccattttgaattctttggattttggtgttaaaagggtattactgggatatgtctgtgtttctaggctgatgaacaatgaagagtacatgatttaaaaaaacctgcagggaatatttaactagtatgtaccagcaataaaatatttaaaaacttatgtactagttggtaaacagtcattgccctgagccattggagtgtcttcccctacaatcctttcctcccactgctgcatggggcactctagtctctggcccttcccccaggattatttcttcacctccctaatgcacagtatctaaagggttgattagtacagcagtgaggctccaagacactgctctggtgccccagtacccaccttcatgttgtatagttgttaaccattttgaattgcaccccaagaaataacatgcaagttactgggtgaatgtgattggaaatgtaaccatgtcttctcttactcaagtacttctgtttgtacctctttctttccctacttttcttcccttagtaggtttgctaagaaacatacacatataactttggagatgatgcatcctttctcttgagttaagtgtgtctctagctgtattcatgtcctatattcttgttctgattttaagaaaaaaaatgttgaaaataataagagtggtattttggtcactgtatttgcctatgggctcaaaacaagaaggatttattatgtatgtttccccaaagcagaacagttctgagattgatgaaaaaactccaacaaattgactgactgatctttagtgagtcaacctctgcaaaatgttcctaggattcggctgaaagagataatgtgtggattaaaaaaaaccccttagatgtatctaagattcctgaagctccatcactgaattaatcataactttgaaacattagttaaagactaccctctaagtcccttttctgacttttgatttttcactgagaagtccagaataaaggtgccttcactttctgggccacaaggcactggaatgaaatcttttgtaataccaatgagacttgtgctcccatctaagagatgctagctccctcctgctacatatgtggtaagcttatttttctaccacctgtgaatatagtttaataatgacaaacttcttgatctttacatcattcatgtctattttaaagtgcatttgagaataaaggattctaggttttcctaataaatattaaactttaaaataaaaactggatcatgtgggtgtattcttctctctgtgtgtatatatatatatatatacacaacatgtagatatgcatgtgtatacatatacacatagacacagagcccctatatacatttattttggcttgatgactcaggatgtaaaatgttgtttctcttaatgtttaataatacattaatgtatttctggtacaatacttctttagttgcttataatattccttatgatgtggaactgttctttacatttctacttgaaatgcatttgctctctctcaacatagagtatttatgcagttttacttacagtgacaaagagatatttctttgaacatattatatgtaaagcaggcttgaactcagcttttgattaaaacatagttatgtggccttctagctcagctgtaattgcatttaaaattcctttctgcactctactgaagaccgcaaaccaatattaataaagtaggcttagagcagtgtagcacctgagcaattggttcttgacaaacgttatttacctagctagagtttcatttcagagctaacatgtctctgtgctacttgaataaagcactcatctgaaaactctgttagacattttaacccaatttaatttattccctgaaagtttaatcccctgttgaaaagagtagttgcaaattttctggagttacaattcactgaagtgaaaaatagttaatgacatcaagagtttagttaaaaatctttctcaaaatgtaaaacagggggcaagagttaataggatattttatatagttatatttcaatccttttccgaatcttcctaaagtcacttgcttctctaccattaaagaggtatgaaatgagttacttagacatctccaggaagtagggggaaaaaccacttatatttgaaaccagaaaagcaaatctcttctgagctttgtcatttaagtggcacattcagtccttttatattttataacaccctttttgtatcacatccaccaaacgaagcaaatattaggtgccggccatctacagctttctacctaactgtatgaggaagcagggtacagtctgcaacacagaatgctttggcactcatatgccatcaacccagacttgattttatgcagtaaattgtccaacagaagtctatttatctgttattgaaatatttttggtttcactgccaaagaggataaaaatatgggtggagagaaaataaaatctgaattgactttgtttttggcatagtagaaagcattttggtcccctttatagtctcttaaaaatttaattattcatttggcagatatacctctatagcacaactggatagttgttttaaaatatgcaaagcgcagatttcagacttaataggagataatgactgctttatagcctgtcaggtcatggcctacttggcctagttacagagatattgcttcatggttcagtgctccaagagctgatgatggctccaggccagcaaaggtgtcattgacataatagaaagtaaaggtttctctggaactctaatgggatgctccataaagcatagatcaaaaatattatggcttggatagtacaaccctagtggggacattgggtggtatttttcctccatatgtcattaagaaaacaaccaaaaatttatgtgcaaagtcataatttcacattctaaaagtaggattattaatgaaaattatattatatttggtggataaccatttgaaaaagataacagtgttctggttgcctaaatgacttggaaagtcaccatttaggcagttcccataaaaaaggcatctgccttaagagctgtcagcctgcagcctggctccagaatctaggctcttaccactatgccatactacttaaaatgtgcaatgttttccgacgtgaatttaaattatggaaatgaaatacttttatacaaaactaacgacatagatcaatataattgtattgattattaatgagtaaaaataaaataaaaaatacaatattattaaccactgagaagaacagcttatgtacattctaattctcaaaataacactgggacagggggattctatctctaaattagaataagaaaatttagattcaagagattatggcttcataatcaattgtcatttggctatgaagtccttgctgaatatccttgagtgtctgtataagcacctggtgtattatgaacagtatgatctgcttgtcagctccttttggagaatgatgattgaggttacactttaacttgaagttcaaggattggggaatgcctctacttggttaagtgtccattcttggttcatatctgttcaatgaactgaatcaccaaaatgtacactcttaaatagcaataggtagtacaaccacctttcatttggtaataccagtaatagtaatcttgtggttttgggtcagaacagcaggataagaattcgaatgctgtttcttgtatgtgtgattctaaggccatctcttggggcagtgggtcttgcatttctctactctatcattaggttactggtatctacatcacaggcagatctgtggggatcaacccactcacataatgtattaacatatgatggaaatgataaacactatgcaaatatttgtttaaaaatctttatgattaaaataaaataatgtcagcctcagactgaaagataagtttagtaaatccagcaaatggattttaaaaaacattagcttcgcttaaacaaaatgtgaaatgaaacagaccacaaaatgacaagatttaatgagcttattatcagtaaaacaattgaatataatgcaaattaattacctgtaaaattatattaaacaggctaaatgacttactaggcgatgattttgcatagtacaataatattttactctctgcaactactaaaaacattgcttcctatatgctcaaaccaaggaattccgtttctctaatatcaatttgtcaatctaaagttctagaactttcctataaaatgatttgcagtgcacatcagtacaacccaaactgagggacattttaccgattaatagcctatgctgttcaaaaatgtaaagaaccagaaatagaagggaaataagctgtagagtcatgacaactgaatgcaatgcaattgcatgtattggatatagattctggactagaaaaattggtaggcataatggggtaacagatgccattagaataatggcaataggttaaattatggtaatatatcaaggttaaatttcctgattttgatagttctactgtggttacataagataatataattttcttagggtctactccaggacctgcttaagggtaaatgggcatggtgtctcaaagttactctcaaaatggctcagaaaatttatacacacatacatacatatatgcataaatatgagagagagtaagacagcaataaagttaatgtgatcaaatgaaactaattggtgaatctcggtaaatggcatatggaagtttcttgtaactttttgtaaattggaaattataccaaaataaaaaaataaaaatctaaatacgtttttgtgcagatttaaattaagatggatagtctttgcagtctatttaagaaccaagattacttaaagaaagacagtttcacttaaaaatgcatttcttgtggctcacgcctgtaatcccagcactttgggaggccgaggtgggtggatcacgaggtcaggagatcgagaccatcctggctaacacggtgaaaccctgtctccacttaaaaaaatacaaaaaattagctgggcgtggtggcgggcacctgtagtcccagctactcgggaggctgaggcaggagatggctgtgagcccaggaggcggagcttgcagtgagctgagattgtgccacgcactccagcctgggcaacatagcgagactctgtctcaaaaaaggcatttcttgattgtttaaacgatcatccagttcgaaaaaaccataaatctcataccttcctttaacattatgtgagactatgaaataaacattttaattaaaaggaaattaatgatacacttagaatatgctatttaatttcaccacccccatggcaaattccatgatccttcgtaaatattacagatcaagttaccttgggtttactttagtacttcctgttgagagttactgactttcaaggcttgtagcaggagagaacctccaaaataccaggacctttattcattagagggtgaaaagtaccaatgatgtgggttatatggaatgagttgacttagagatggatttgaagtatgcgaaaaaaaaagacttccatggaataattttttaaaaattttaatattatagttatttaacaaaagcttgctgatggatttatttatttttgcctgggatagaatagaaaatctgacattttacttttactttccccttttaaaagcaagacttctgaaaataggaatgaatgagattttgggaaacacatataaaacattttcccttcagagcctgaagaataattgcctctgtgttatcatttgcttgactgaaattctgttacaatggttctctcatttcaattctctccttcctcacagtcctcactgttcagataaaagcctgggaagatctgtgcacaagtttgtgtccaaagtcaacccaagagaccccgaggtgtaattgcaatagactaggttaatgcctcttttttaggggtttgcaaatggtgccaattttctagtatctcttcctttcacaaaattaaaacttgccagcaaagttaagcaagttccttgttttgaagtgatttggtgatttccagagctttgaagctttaaaagctctgaagaagacgttaaataccagctctcaataaaggaaaaccttggaatgcaagaggagtgggctggatggtaacgaaccttcatcacaattttggctctgctcctaaccatcttgatagccttttgtgagtcactttagctctatgaggctcagctttctaagttataaaatatgttcaatggccccttccagcctcagatgtttagtgattgtaactctcaacagtcatggattttcatgacacaaccacagagcaaaaatgtcacagtcaaactgtgtttatttacactttatcaactgtagagtcaagccaaaaatgccttcaatactcacattttaatatcgttttaatttgtgctgttaatgaacacttttacagctctattttaaaccgttgcaaacatacccataaaattgtgtttgcttcgcattttaaaaaccccactgcatttcccaagcaaataggcatttatgcaaacaaatagcctaacacgtgtctaactgcctgtttcaaagcaattattatttgtcaatacaaatgtccacttgagtagtgcaaagaaaatgctcccagaaagtttggcaggctctgttctctgcttcaattctatcagtattcttttcattaccacattaggatcaaatttctagaaattcaaggaagaaaatgtagaatatgatgctaactttcttgccactaagagaccatactcactattttattaagttttgctaatgtttgtcaagccccccaaaatatagttttatgctcatctaggtattttgctcttattcagttttgtcttaagtaaaaatacatttatttggggatttttggtataacatttttggttataatggcctgtagcagtcacttgtattttccaagaagaatgccaccttttcttcttgtgccactgtgcatgattacagaattacacaaaacctccacaaaggattacaatacaaacacctttatatctgccagatatataatatttaggaaggatttgtatagggtgctatgagtggatcaatgattgctgtagaaatgaagtttatggggagctagataatgcggagttagcttagctaatgggaatgtgtagataggattccaggaaggggaagcagcttatacacaggttctaaagttggaataaagagagcacatgaaaaagtctgatgtgcaaaaatcctgagactaaagggaaaagtagccaacatgaagctagagacatagacacatgttgcattgacttagactactttccaataagtaagcaagtagataagttaataaataatcaaataaataaataggtaagtgtatctgagctttgaacatcctttctctcaggaatagggcccacaataacttctttagtggatgacggcttttagtagtagttccttcaacaacagctgctccttccaggtcactaaagctcacagaataggtggttcccacagagtgcctcagccagcagttaccacaaaagttcctgtccatcttttttcaaagagacctgggacccttagtgacacaatcctgtctttcagcaccatgaatagaggcagctgtcatatgtcctagctgtgccctctagcggcagctggaatgttacccggctctttgaaaagggtaattaaaatacctctcagtatttgaagtcagtgagtttagggacatactaggagaggaaagtcttccccaacgacctgttctctcagtttgcctatgatgccttctatccacagtgctcaaggtaaaacaaactgctaataatgagtaagccattttaagctacattaaaagagggttgagggaatttctgaaaatatatacaaattttcatccaacctctctattgtgacttatcttacagcatctctagtcattttgaggttatgtctgcctcattctctctatgacctatttcatcttatgatgtttgtatgaatacccttctttgatttaatggaactgtttacttaagacttggctctttttgttaccaaggatattttttcttttaactccaggagcaccactcagttttgtgtctgattaacttttcttaacagaatctaaatccagaggccatctttttgcttatttatgagatctctctggctaaacatcttttttcattagcacatgtctcttcagtatgagatttcacacaccatgctttaagaacctgggaattgaggaaaatggtgatgcaagaccaaagcaaaatctagcccaggcttgtggacagcagcagcatctgattccaaatctggcagtaactggttaagagatctgcagagggcagagtatagtaacccagtgctaggaatcttgcaagggagaaacagaaggtcaaggaatggatgttaccttcttagggaagagctttttaaaagaattctcaagggaatagttttcttatagaaatagtggtgtttgatattctcagtgcatgagttgtatcttccctgagctatgccgaagaacccattgtaggacaggcgctgtgactcacgcctgtaatctcagcactttgagatgccaaggcaggcagatcacttgaggccaggagttcgagaccaacctgggcaacatggcgaaaccctgtcttgactaaaaatacaaaaattaactgggcatggtggtgggcgcctgtagtcccagctacgcagtaggctgaggcatgaggatggctagaacctgggaggcagaggttgcagtgagctgagatccagccactgcactccaacctgggcaacagagtgagattctgtctcaaaaaaaaaaaaaaaaaatccatcgtagggcctggtactctaagttggatgtgtttttaccacttcttgctctggccaaggcatgattcaccaaaaatatttatttacttaatgtaaaaaattcttgaaggaattcaaactccagcatcatccacctttgttgaaagggtgagaggtctattctatctactagactttattttttcttagacaatgccacactagaacattggatttgctctgcttcagagagttggagattcccaggacttttataggagtgtggagaggctctatttccaggatctttacctatttttttttatttctgggttgaccgacattgtccactcagcacctggaaagttctgagcactgtccatgcacaatactctgatcagaaaaagacactagaagggtttttgaatcaatctaaggtctaaatgacacaggaatgttattccttggcaactaatctccattatttaatttatataacgcttccttctaacaaaaggcttccaggtgaaactctggataatcagagtgtgttaatttaggcatattgtatcaaaaatatcaaagtcattatttccttaggaatttggacttctattggataagctgtgttattattgctacaaagtgtgtttttatataaagttgtatataagaacatctgtatgtatattattaataccagtggctaataggtacaaatgtcttacatatactattctgaaaatatggttggaaggtaagtcaatccttcctcgtttgcttctttttctttttttttttttacactttactgcaataattttcatttttttgtttgttttttttaaatgtattattattatactttaagttttagggtacgtgtgcacaatgtgcaggttagttacatatgtatacatgtgccatgctggtgcgctgcacccactaactcgtcatctagcattaggtatatctcccaatgccgtccctcccccctccccccaccccacaacagtccccagagtgtgatgttccccttcctgtgtccatgtgttctcattgttcaattcccacctatgagtgagaatatgcagtgtttggttttttgttcttgtgatagtttactgagaatgatgatttccaatttcatccatgtccctacaaaggacatgaactcatcattttttatggctgcatagtattccatggtgtatatgtgccacattttcttaatccagtctatcgttgttggacatttgggttggttccaagtctttgctattgtgaataatgccgcaataaacatacgtgtgcatgtgtctttatagcagcatgatttatagtcctttgggtatatacccagtaatgggatggctgggtcaaatggcgtttctagttctagatccctgaggaatcgccacactgacttccacaatggttgaactagtttacagtcccaccaacagtgtaaaagtgttcctatttctccacatcctctccagcacctgttgtttcctgactttttaatgattgtcattctaactggtgtgagatggtatctcatagtggttttgatttgcatttctctgatggccagtgatggtgagcattttttcatgtgttttttcggctgcataaatgtcttcttttgagaagtgtctgttcatgtccttcgcccactttttgatggggttgtttgtttttttcttgtaaatttgtttgagttcattgtagattctggatattagccctttgtcagatgagtaggttgcgaaaattttctcccattttgtaggttgcctattcactctgatggtagtttcttttgctgtacagaagctctttagtttaattagatcccatttgtcaattttggcttttgttgccattgcttttggtgttttagacatgaagtccttgcccatgcctatgtcctgaatggtaatgcctaggttttcttttagggtttttatggttttaggtctaacgtttaagtctttaatccatcttgaattgatttttgtataaggtgtaaggaagggatccagtttcagctttctacatattgctagccaggtttcccagcaccatttattaaatagggaatcctttccccattgcttgtgtttctcaggtttgtcaaagatcagatagttgtagatatgcggcattatttctgagggctctgttctgttccgttgatctatatctctgttttggtaccagtaccatgctgttttggttactgtagccttgtagtatagtttgaagtcaagtagcgtgatgcctccagctttgttcttttggcttaggattgacttggtgatgcgggctcttttttggttccatatgaactttaaagtagttttttccaattctgtgaagaaagtcattggtggcttgatggggatggcattgaatctgtaaattaccttgggcagtatggccattttcatgatattgattcttcctacccatgagcatggaatgttcttccatttgtttgtatcctcttttatttccttgagcagtggtttgtagttctccttgaagaggtccttcacatcccttgtaagttggattcctaggtattttattctctttgaagcaattgtgaatgggagttcactcatgatttggctctctgtttgtctgttgttggtgtataagaatgcttgtgatttttttactttgattttgtatcctgagactttgctgaagttgcttatcagcttaaggagattttgggctgagacaatggggtttcctagatctacagtcatgttgtctgcaaacagggacaatttgacttcctcttttcctaattgaatactctttatttccttctcctgcctaattgccctggccagaacttccaacactatgttgaatgggagtggtgagagagggcatccctgtcttgtgccagttttcaaagggagtgcttccagtttttgcccattcagtatgatattggctgtgggtttgtcatagatagcttttattattttgaaatatgtcccatccatacttaatttattgagagtttttagcatgaagggttgttgaattttgtcaaaggccttttctgcatctattgagataatcatgtggtttttgtctttggctctgtttatatgctggattacatttattgatttgcgtatattgaaccagccttgcatcccagggatgaagcccacttgatcatggtggataagctttttgatgtgctgctggattctgtttgccagtattttattgaggatttttgcatcaatattcatcaaggatattggtctacaattctcttttttggttgtgtctctgcctgagtttggtatcaggatgatgctggcctcataaaatgagttagggaggattccctctttttctattgattggaatagtttcagaaggaatggtaccagttcctccttgtacctctggtagaattcggctgtgaatccatctggtcctggactctttttggttggtaagctattgattattgccacaatttcagatcctgttattggtctattcagagattcaacttcttcctggtttagtcttgggagggtgtatgtctcgaggaatttatccatttcttctagattttctagtttatttgcatagaggtgtttatagtattctctgatggtagtttgtatttctgtgggatcggtggtgatatcccctttatcattttttattgcgtctatttgattcttctctctttttttctttcttagtcttgctagcggtctatcaattttgttgatcctttcaaaaaaccagctcctggattcattaattttttgaagggttttttgtgtctctatttccttcagttctgctctgattttagttatttcttgccttctgctagcttttgaatgtgtttgctcttgcttttctagttcttttaattgtgatgttagggtgtcaattttggatctttcctgctttctcttgtgggcatttagtgctataaatctccctctacacactgctttgaatgcgtcccagagattctggtatgttgtgtctttgttctccttggtttcaaagaacatctttatttctgccttcatttcgttatgtacccagtagtcattcaggagcaggttgttcagtttccatgtagttgagcggttttgagtgagtttcttaatcctgagttctagtttgattgcactgtggtctgagagatagtttgttataatttctgttcttttacatttgctgaggagagctttacttccaagtatgtggtcaattttggaataggtgtggtatggtgctgaaataaatgtatattctgttgatttggggtggagagttctgtagatgtctattaggtccgcttggtgcagagctgagttcaattcctgggtatccttgttgactttctgtctcgttgatctgtctaatgttgacagtggggtgttaaagtctcccattattaatgtgtgggagtctaagtctctttgtaggtcactcaggacttgctttatgaatctgggtgctcctatattgggtgcatatatatttaagacaattagctcttcttgttgaattgatccctttaccattatgtaatggccttctttgtctcttttgatctttgttggtttaaagtctgttttatcagagactaggattgcaacccctgcctttttttgttttccatttgcttggtagatctgcctccatccttttattttgagcctatgtgtgtctctgcacgtgagatgggtttcctgaatacagcacactgatgggtcttgactctttatccaatttgccagtctgtgtcttttaattggagcatttagtccatttacatttaaagttaatattgttatgtgtgaatttgatcctgtcattatgatgttagctggttattttgctcgttagttgatgcagtttcttcctagtcttgatggtctttacattttggcatgattttgcagcagctggtaccggttgttcctttccatgtttagcacttccttcaggagctcttttagggcaggcctggtggtgacaaaatctctcagcatttgcttgtctgtaaagtactttatttctccttcacttatgaagcttagtttggctggatatgaaattctgggttgacaattcttttctttaagaatgttgaatattggcccccactctcttctggcttgcggagtttctgccgagagatccgctgttagtctgatgggcttccctttgagggtaacccgacctttctctctggctgcccttaacattttttcctgcatttcaactttggtgaatctgacaattatgtgtcttggagttgctcttctcgaggagtatctttgtggtgttctctgtatttcctgaatctgaacgttggcctgccttgctagattggggatgttctcctggataatatcctgcagagtgttttccaacttggttccattctccccatcactttcaggtacaccaatcagacgtagatttggtcttttcacatagttccatatttcttggaggctttgctcttttctttttattgttttttctctaaacttcccttctcgcttcatttcattcatttcatcttctatcactgataccctttcttccagttgatcgcatcggctcctgaggcttctgcattcttcatgtagttctcgagccttggttttcagctccatcagctcctttaagcacttctctgtattgattattctagttatacattcttctaaatttttttcgaagttttcaacttctttgcctttggtttgaatgtcctcccgtagctcagagtaatttgatcgtctgaagccttcttctctcagctcatcaaagtcattctcaatccagctttgttcccttgctggggaggaactgtgttcctttggaggaggagaggcgctctgctttttagagtttccagtttttctgctctgttttttccccatctttgtgattttatctacttttggtctttgatgatggtgacgtacagatgggtttttggtgtggatgtcctttctgtttgttagttttccttctaacagacaggaccctcagctgcaggtctgttggagtactcggctgtgtgaggtgtcagtctgcccctgttggagggtgcctcccagataggctgctcgggggtcaggggtcagggaaccagttgaagaggaagtctgcccgttctcagatctccagctgcatgctgggagaaccactgctctcttcaaagctgtcagacagggacatttaattctgcagaggttactgctgtctttttgtttgtctgtgccctgccccaagaagtggagcctacagaggcaggcaggcctccttgagctgtggtgggctccacccagttcgagcttcccggctgctttgtttacctaagcaagcctgggcaatggcgggcgcccctcccccggccttgctgctgccttgcagtttgatctcagactgctgtgctagcaatcagcaagactccgcgggcataggaccctccgagccaggtgcgggatataatctcctggtgcgccattttttaagcccgtcggaaaagcgcaatattcgggtgggagtgacccaattttccaggtgccatctgtcacccctttctttgactaggaaagggaactccctgaccccttgcgcttcctgagtgaggcaatgcctcgccatgcttcggctcgtgcatggtgcgcgcacccactgacttgcgcccagtgtctggcactccctagtgagatgaacccggtacctcagatggaaatgcagaaatcacctgtcttctgtgtcgctcacagtgggagctgtagactggagctgttcccattcggccatcttggctccttcgccttcgtttgtttcattctagacagagttgcactttgactttaagaagctaaaaatttgtctattaccattcatataatagccttgttatggaaaaatcatttgtattgaccactaattcaggtagaaagaagcaattcctacatatagaacacttctctcttcctgaaaggcatctgtatttactgacaaaatgaaatcgttttatgggtaatacaaaagtgattctgaagtgtctgttttagcaaagaaatagtcttttaatgtgttattttaaatgttttattcattattataaccatgtactcaggggtccttagatgagatacgccttataacttttaaaaaaatgtaatataaaatataagctatttttttctgggttattgtctccttgttagtggtgaatcagtgagtggtgaggaaatgtgaaggcctaggatacaactatttactattgtagactttataaggactatacccttgggcttcatgaaatttataattttttaaatttttaaaaaaattttactttaagttctgggatacatgtgcagagcatgcagatttgttacataggtatacatgtgccatggtggtttgctgtacccatcaacccatcatctacattaagtatttctcctaatgctatccctcccctagccccctactacctgacaggccccctgtgtgtaatgtttccctccctgtgtccatgtgttctcattgttcgactcccacttatgagtgagaacacgtggtgttttgttttctgttcctgtgttagtttgcttagaatgatggtttccagcttcatccatgtccctgcaaaggacatgaactcatccttttttatagctgcatagtattccatggtgtatatgtgtcacattttctttatccagtctatcattgatgggcatttctgttggttccaagtctttgctattgtgaatagtgctgcaataaacatatgcatgtatgtgtctttatagtaggatgatttatacttctttggatatatatacccagtaatgggatggctgggtcaaattgtatttctggttctagatccttgaggaatcgccacactgtcttcctcaatggttgagctaatttacactcccaccaacactgtaaaagcgtttctatttctccacatcttctccagcatttgttgtttcctgactttttaatgatcaccattctaactggcgtgagatagtatctcattgtggtttttaatttgcatttctctaatgaccagtgatgagctttttttttaatatgttttttggccacataaatgtcttctttcgagaagtgtctgttcatatcctttgcccactttttgatgggattatttttttcttgtaaatttgtttaagttatttgtagattctggatattagccctttgtcagatggatagattgcaaaaattttctcccattctgtaggttgtctgttcactctgatgatagtttcttttgctgtgcagaaactctttagtttaattaggtcccatttggcaattttggcttttgttgccattgcttttagtgctttagtcatgaaggctttgccatgcctatgtcctgaatggtattgcctaagtattccagggtttttatggttttagatcttatgtttaagtctttaatccatactgagttaatttttgtataaggtgtaaggaaggggtccagtttctgttttctgcatatggctagccagttttcccagcaccatttattaaatagaaaatcctttccccgttgcttgtttttgtcaggtttgtcaaagatcagatggttgtagatgtgtggcattatttctcaggcctctgttatgttccattggtttatataactgttttggtaccactaccatgctgttttggatactgcatccttgtagtatagcttgaagtcaggtagcgtgatgcctccagctttgttctttttgcttaggattgtcttggctatacgggctcttttttggttctatatgaaatttaatgtagttttttctaattctgcaaagaacgtcaatggtagcttgatggggatagcattgaatctataaattactttgggcaatatggccagtttcacaatattgactcttcctatccatgagcatggaatgtttttcccatttattttgtcctctcttatttccttgagcagtgatttgttatgatttccgttcttttgtatttgctgaggaatgttttactttcaagtatgtggtcaattttagaataagtgtgatgtggtgctaagaagaatgtatattctgttgatttggggtggagagttctgtaaatgcctcttaggtcctctcggtccagagctgagttcaagtcctgaatagccttgttaattttctgtctcattgatctgtctaatattgaccgtggggtattaaagactcccacttttgtgtggaagtctaagtctctttgtagttctccttgaagaggtccttcatatcccttgtaagttgtattcctaggtattttattctctttatagcaattgtgaatgggggttcactcatgatttggctctctgtctgttattggagtataaaaatgcttgtgatttttgcacattgattttgtatcctgatactttgctgaagttgcttatcagcttaaggacattttgggctgagaccatggggttttctaaatataaaatcatgtcatctgcaaacagggacaatttgacttcctctcttcctatttgaatttcctttctttctttctcttgcctgattgccctggccagaacttccaatactatgttgaataggagtggtgagtgagggcatccttgtcttgtgccagttttccaagggagtgcttctagcttgtgcccattcagtatgacattggctgtgggtttgtcataaatagctcttagtattttaagatatgttccatcaatacctagtttattgagagtttctagcatgaagggttgagttttattgaaggccttgagcaggtattgagataatcatgtggtttttgtcattggttatgtttatgtactgtattatgtttactgatttgtgtatgttgaaccagccttgcatcccagggatgaagccgacttgatcatggtggataagcttttggatgtgctgctgcatttggtttgccagtattttattgaggattttcacattgatgttcatcagggatattggcctgaaattttcattttttgttgtgtctctgccaggttttggtaccaggatgatgctggcctcataaaatgagttagggaggactccctctttttctgttgtttggaatcatttcagaaggaatggtaccagcttctctttgtacctcggtagaatgctactgtgaattcatctggttctgggctttttttggttggtaggctgttaattacgccttaatttcagaactcattattggtctattcagggattcaatttcttctttgtttagtcttgggagggtgtatgtgtccaggaatttatccattttttctagatcttctagtttatttgcatagagttgtttatagtattctctaatagtagtttgtatttctatgggatcagtggtgatatcccctttatcatttttattgtgcctattcgattcttctcttttattctttatttgtcttcctagccatgtattttgttaatcttttcaaaaaaccaactcctggattcattgattttttgaaggattttttgtgtctctatctccttcagttctgctctgatcttagttatttcttgtcttctgctagcttttgaatttgtttgctcttgcttctctagtttgtttaattgtgatgtcagggtgttgattttagatctttcctcctttctcctgtgggcatttagtgctataaatttccctctaaacactgctttagctgtatcccagagattctagtatgttgtgtctttgttctcactggtttcaaagaacttatttatttcggccttcattttgttatgtacccagtagtcattcaggagcaggttgctcagtttccaggtagttgtgcagttttgaatgagtttcttaatcttgagttctaatttgatggcactgtggcctgagagactgtttgttatgatttctgttattttgcatttgctcaggagagttttactttcaattatgtagtcaattttaggataagtgtgatgtggtgctgacaagaatgtatattctgttgatttgggatggagagttccgtaaatgcctattaggtcctcttggtccatagctgagttcaagtcctgaatatccttgttagttttctgtctcattgatctgtctaatattgacagtggggtgttaaagtctcccacatttgtgtgacagtctaagtctctttttaggtgtctaaaaatttgctttatgaatatgggtgctcctatattgggtgcatatatatttaggatatttagctctgcttgttacattgatccctttaccattatgtcatgcccttctttgtcttttttggtctttgttggtttaaagtctgttttctcagagactaggattgcaacccctacctttttttttttatgctttccatttgcttggtaaatattcctctatccctttattttgagcgtgcgtgtgtgtttgcatgtcagatgggtctcctgaatacagcagatcgatgagtcttaactctatccaatttgccagtgtgtgtcttttaattggagcttttagcccatttacatttaaagttaatattgttgtgtgtgaatttgatcatgtcagtatgatgctagctggttattttgcctgttacttgatgcagtttcttcatagtgttgatggtctttacagtatggtatgtttttgcaatggctggtactggtttttcctttgtatatttagtgcttccttcaggagctctcgtaaggcaggcctggtggtgacaagatatctcagcatttgcttgtctgtaaaggatttttatttcttcttcacttatgaagcttagtttggctggatatgaaatcctgggttgaaaattcttttgtttaagaatgttaaatattggcccccagtctcttgtggcttgtagggtttctgcagagagatccactcttagtctgatgggcttccctttgtgggtaacctgacctttctctctggctgcccttaacattttttccttcatttcaaccttggtgaatctgacaattatgtgtcttgggatggctcttcttgaggaatatctttgtggcattctctgtatttcgtggatttgaatgttgacctgtcttgctagattggggaagttctcctggataatatcctgaagagtgttttccaacttgtttccattctctctgtcactttcaggtacaccagtcaaaggtaggtttgttttattcacacgttcacatatttcttggaggctttgttcattccttttcattcttttttctctaatcttgtcttcacactttatttcattaagttgatcttcaatctctgatatcctttcttccactcggtagattcagctactgatactcgtgtatgtttcatgaagttctcgtgctgtgtttttcagctccatcaggtcatttatgttcttctctaaattggttaatctagttagcaattcatccaaccttttttcaaggttcttagcttccttgcattgggttagaacatgctcctttagcttgggggagtttactattaccaaccttctgaagcctacttctgtccattcgtcaaactcattctccgtccagttttgttcccttgctggtgaggagttgtcatcatttggaggagaagaggcattctggatttggaatttcagtcttttgcactggtttttcctcatctttatctacctttggtctttgatgttggtgacctttggatggggtttctgtgtggatgtcctttttgttgaggttgatgctattcctttctattagttttccttctaacagttaggaccctctgctgcaggtctgttggagtttgctggaggtccactccagaccctgtttggctgggtatcaccagaggaggctgcagaacagcaaagattgctgcctgttccttcctctggaagctttgtcccagagggacacctgccagataccagctggagctctcctatatgaggtgtctgtcgacccctgcttgggggtatctcccagtcaggaggcacgggagtgagggacccacttgaggaggcagtctgtcccttagcagagctcaagtgctatgctgggagatctgctgctctattcagagccagcaggcaggaacatttaagtctgccaaagctgtgcccacagctaccacttcccccaggtgctctgtctcaggaagatgggagttttatctataagcccctgactggggctgctgcctttctttcagagatgccctgaccagggagaaggaatctagagaggcacattggctacagtaggtttgctgagctgtggtgggcttcacccaatccgaacttcccccagcagctttgtttacactgtgaggggaaaatcgcctactcaagcctcaataattgtggatgttcctctccccaccaagctcaagcatcccaggtcgacttcagactgctgtgctggcagcaagaatttcaagccagtggatcttagcttgctgggctccttgggggtgggatccactgagcaagaccacttggctccctggtttcatccccctttccaagggagtgaacggtttcgtctcactggagttccaggcaccagtggggtaaaaaaaaaaaaaaaaaaaaaaaaaaaaaaaaaccctgcagctagctctttgtctgcccaaatggccacccagttctttgcttgaaactcagggccctggtggtataggcacccgagggaatctcctggtctgtgggttgtgaagactatgggaaaagtgtagtatctgggccagaatgcaccgtccttcaaggcacattctctcacagcttcctttggctagaggagggagttccctgaccccttgtgcttcctgggtgaggcaacaccccaccctgcttctgattgccttccatgggctgcacgcactgtctaaccattccctgtgagatgagctgcgtacctcagctggaaatgcagaagtcacccgccttttgcattgatcttgctgggagctgcagactggagctgttcctatttggtcatcttgccagtcacctattttcctcttttttctttctttaaaataaccttagcatactgtaccttttttctttataaacttttaattttttaaaacttttgattattgtgtaataacacttaggttaaaacacaaacacactataaagctgtacaaaatattttctttctttccatccttattctataaactttttctattttttaaatttttatatcttttgctttttaaacatttttaaaaatgaagacacaagcacacatattagcctaggcctacacagggtcagcatcatcaagacattattaggtgataggaatttttcagctccattataatctcctgggaccaccattgtatatgcagtccatctttgtctgaacatcagtaggcagtgtgtgactgtacctctaaagatgaccacagagttgtcagaattatgctaattcccacttcagtttgtttggattatttgagctgatgtaatgtttccagtcaggagacaagtatagaatagcagtgcacattctgaaagccttattttcctttctccttcagggtttcataacctaacttggcataataggtctcatgtgttgtgctcaaactgcatgtaacgctatatttatgccttatatttgtagcccctatatttataccttagtataaaagaaatgaaggaaataagtgcatatcctcttatctgatttttacccagaattacatagatagcttgccattgtttggatggcaagaagaataaatacaggcatgtatttatccccatgacatgcactacatacaaatttttcagttttgtcttcacaaaaacccaatgagttaggtattatctaaattttttaaatggataaaatgtggctctaagagatagacaatgatgaagtagcaggatttgcatttagacctatgatctctgactgcaaagcccattctcttagttcctatgtaatacaggctcctggagcctactgggttaagagagagccatgaagctccttttctgcttttccattgttaatgcagctctgtggtacctgaagcactgctttgcatgaaggaaatgatgtaccttttttgttgcttgttttttgcttttgttttttttttcctttaaatttatttatttattcccagctttactgatatgtaattgaccaataaaaatggtatatactcaaggcttataatgtgatgttttgatttatgtatacactgtgaaatgattaccacaaccaagctaattaaaatatccattacctcacatagttaccattttgtgtgtgtgtatgtagtgagaactctcctactctcttagcaaatttcaagtatagaatacattgttaataactgtagtcaccatgttgtacattagaactccagaacttattcatcacataatcaaatgtttgtatcctttaacaaacatctttcaatttcctccattccccagcctctggcaaataccagtctacttcctgtttctgagttccacttatttggattccacatacaagtgagatcatgcagtatttgtttctgtctagcttattttacttagcacaatgtcctgtaggttcatccatgctgctacaaatgacaggatttccttctttcttaataattttctcatccattatgcatatttctcattaattatatagctcatatcttctttttccattcatcccttgatggacacttaggtctatatcttggcaattgtgaataatgctgcaatgaatataaaatgcagattttttttgagaccctgatttcattttctttggatataaacccagaagtgggattgctggatcaaatggtagttctatttgtagttgtagttttttgaggaatctccagattgttttccataatctctctaccaagttataatcccatccacagtgtacagctgttccctttctccacatcgtgttcagcactgattattgtttgaccttctcataatagttatgctgacaggtgtgaggtgatatatcactgttgttttgatttacaggaaggaatgtatttttgaggtattaaaacactactttcctctggcttatgtaaaatgcaggtactttgggtattatcaataaaatacaggctctaaatttgtaagaaaggaatctctgagtgccatgtgtccccctaaaatattgattgtgaatcaaataacattcactattaaaatagatgtagctaagaatatgaaccatacaggtaatttattaagtgcttactctatgctaggcactccttctgccaagatacacatggcataaaatagaaagaacatctttcaaatattcttaagactgtagtcttgggaaactaaactcttgagataattgtatgaaaaagagtctaacacatctttaaatagctgcctacctttctctaaactagttaagaaagggtctagtgaaaacatgggcaccacgtaatctaccttgtaagattcagagtgcctgagatagaattctaaatttctttgcagagagaaaaagcaaaacaaattaaaagatgaaggaatactatatccatgtaagtctatggccagtaaagacacttttgggtatggatgactcattttatcctatatgaacttcttttaaagtaatcatacaaatatatacacccagaaaaaatgaaaattcaatgagagaggggagtgggatatctgaaaaagcaatgagcaaagaaaacattggaattgaggctaaaatagtaactatgtaacctggctataaaacaatgtaataattaaggatctatcacacaaaacgtatataaaatgtaaaaatacggtatattcataatatagaattctaactatacttaagtttaaaataaaggtgatgtgcattgtagaatgtttagttaataaaatacaggtgatatatctgaatatactagctgagatgtgtctctgagatattttgttaattggaaaatatataatgtaatttataaaatagacaccatgtatgtaagatatttatatatgaaaaagaaaatacttaggaacaatatataccaaaatttgaacaggttttatctttggtgggggtgggattgcaaggaagcaggggttgatgatgaagaacatcttttacattttattttattaatttcctataatgtttaatgttttaataagcataaattaatgtaaaatttcattattgaaatggcttttaaaaataaaggatatatcctgtggaatagtgagaagtagcttaccagcagtgattttggacaagtgctatttgagtttccatatctcttcagtaagctgaagactttgctattgacctcaaagttagtgagtgtgtgcgtgtgtgcgtgtgtgtggtttaaatgtaatacaatgccatatgtaaagtgctaattacaatgtcagtgatatagtgtgcccttaaccaatagtagtcaatattatgcaacatatattgaacataggtaaccataaaccactaaaatgaagttgtaatcatagagcaatgtttgtttgttggttacttattcaccagtgagcaatgttgcttgagcaatagttttttttttaaacatttttgtttgtgttcatacatttggtgaaataaatataaatttttcaaagcaatcttgagattatttatgctgaacagtaatagatcaacagtaaaatatgcaggttggtaaaagttaaaagacatctcatttctcatttataaaaagagatatacaaatgtttggagacacttctagttgaagattgtatatataaaagagatatacaaatgtttggagacacttctagttgaagattttatatataaagaagtaaacattttgtcacgtacagccagaatagttgaagtgggagtgaagtcgagaagtggtttattcccccaaaatggtgtctttcaacaatattttaaaagataatgtattggcattatggcattattactataaacctattatgagatgatattagaacaagcagtgtgtaattatgctcctaagacatgtataggaggagctagagcaaagtgtggcaactctttttttttcttttcttttttttttttgagattgagtctcgctctgtggcccaggctggagtgcagtggcgtgatcttggttcactgcaagctccgcctcccgagttcatgctgttctcccgcctcagcctcccgagtagctgggaccacaggcacccaccaccgtgcccggccaatttttttgtattttcagtagagacggggtttcagtgtgttagccaggatggtctctacctcccgaccttgtgatccgcccgcctcggcctcccaaagtgctgggattgcaggcatgagccaccgcgccctgccaaagcatggcaactcttcatgtgctcacacttccaccatccaatggtggttttttctctctagccccaaactcagtttctgtcctaggtatgctcctttgatgttagatctaagcttggtctttgtttaatgttgaagaaaatgacccttgtctatgcccctatttgtatatagtctcaaaagaatcatatatttaaaaatgcatacacttatgttaataatctttatgtctgaatgtttctgaaacaatgagacacatcaaatttgtggaaatggtatcattgaactagagagccagctcctttggtaatgggcattggccacttttgacatggaaaattatcctcaggaagtatatttggtgttttcattataatattatagaaaatatttatagaaaaaggtccatatgctttggttttttgtttgtttgtttgttttttggtaatcatctttatgctatagtccttaccacttctgatgatcaactggctcctcttctgcctgtcctcaaagtgctaacatttttaaagatattcttagcatacttctttattaccacacgtttcttgcacaataccatctactcatactacaaaatcaacatcaccatccctctcatgtctccagaccttcagatccttgttcccagtttcctagtggatggcatcaccagaatgacttcccacaggcgcttaatctcccaatatttctatgagttttaattttattttccagccaacttgttaccactgttttccttgcagatgcaagcaagctttctcaaccttttttatgtttctatttagccaagaatcatcaagcttagttaatcctacgtctgaattatcccttagatccatcatttcttcctctttttctctgctactgttttggttcaggttcacttctttttcaaatgaaatattgcaattagttatttaattagtctcccttccttcaaggtctctattaaaccaccctttaatatctactcagcgattcttctagagccaggatgacctacttaaaaagaaaacaaaatgaaatgtagtgactccctatttcctgtaagattaagtttaaatgccttagcagcacctttacgatttggccgtagcctgccttctacaagtttttggcaagctcttctatttctcctctaaagtaatgctccctggcgttcagcagtaagaagctattttctttttttcccctttctttattgacaagtgaaaattgtgtataattatggtgtacagtataaggctatgagatatgtatacattgtggaatggctaaatcaagctatttaccatatgcattatctcacatacttgttttttgtgtatggtgagaatgcttaaaatctactctcttagcatggtctcacttaaatgtggagtgtaaaaaagttgaactcataaaaacagagtaaaatggtggatacctggggggtgggggtgggtggagtagagagatgtttgtctatgaatgtaaaattttagttagagaataataagtttttttttcattcttacatttgacacgtcctttctctgctctgtgctttggcactgtctgccccgaaacagagtcttgctctgtcgccaggctggagtgcagtggtgcaatcttggctcactgcaacctctgtttccctgattcaagcaattctcctgcctctgcctccctagttgctgggactacaggcatgtgccaccacgcccagctaattttttttttttttttttttttgtatttttagtagagacagggtgtcaccatgttggccaggatgatctgatctcttgacctctttatcctcctgccttggcctcccaaagtgctaggatttcaggcgagagctactgtccccggccctgttctttattcttggaagaactcctctggcccatgcactagctgttaaagtaccaagcctcttttatctaccacatctaaggatcatctcttctgttataccttctctacctttcaactttgactatgattgctggaatgttacacatagtgctggttgcatcacactgtgatggcttaattgatgcctccagtagactgtgaacttctcgagagccaggaccatgtgccattgatgtttgcatttctttattccactcaatattcttgtagtctcactatacagctattttgttaataagacaaaagaaattggagttgttagtcttgaacagctctggggactttgctaaggaaccttcctgtttttttccagatttatattctcttttagacattgccctactcccttcctaagtaaaaagcaaggactgagggaataagaatatttaagacagtgttaatgatgattacagctgaaacctgctttgattctttacccacactgagatgttccagagaggcttcctgactgtcagcaccacttgaagcctttcccattatatcactgaaggcaaataattcattgcatttggaagctaagctgtttaataacaaaggatgagcataattttagctaacttgagttcaatcacttactttatttgccatatatttaggcagtcacagcagcactttcaaaaatatatgcttgctttctttccttttcaacatttcaattcatgttacattgtttggagttcaatatatattgatgctatccttaatataaatttaaaaaattattttattgtggtatgagcacttaatgtgagttctaccctcttaacaaatttttaaactgtaaaatacaatattgactataagtacaaatgttgcaaagcagatctctagaatttatttcaacctgattaactaaaactttatgctcattttctccccattttcttctcccccgctttcccccacagcatgcttttttttttaattgtttgctttatgtttgtggttatattgaagggagattttctttcaagaatgctttatgctcttaaatccgattataaattaataatttacataaaatattatgtagtgagattcagaggtaaaaatatctggtgatgacaacagctaagacgactattgaacagtgttccaggtactgtccttagtaatttgaatggagtgccctatttaatcctcacaacagccctgtgaagaagattgatattattcttctattccctagaagagagaaacagtgaagcttaaacaagttaagtaacttgcccacatcacacagctgttaaagatcagaacctggactgggattcaggcagtctgactccagagtgcactcccataattactacagctgtggataacataatttagaactaaacaatttttattctacctgaaaatcagaggtttgtctgtcagaggagtcttagcaactttttgaatagattgattcttccttcttgaaaccatattcactacttccacaagttttactttcatttccccctatgctactggtaaattgagctgtaaatccctcttttcctccttctttgggataatttcgttactgcttcattagccagtgcatcatgaaagcatctcaatacagccctttgctgatgctgagatataagcactaagccactactaaatgcattcctgtatttattctttttgccacacaaacaatgggaaactgtctagataattccaggcaaaagccagagaagaggatacacatgtatttgttttatactgaggcataaatgtaggaactgtgataagggcaatgcttatgtaactaggcaagtgcagattcagatgtttaatcaattagattttattcacgcacacacacacacacagtctcccaaatccaaaggtatgtactatttttactgattaatgttagttttaaattttacattatagctactctgtgttacagaaaaatagtatcttttgaaatgcagtaccttcagaaaatgagtgggaaagctgtagttgtttttattagttttataactataatgaaaaatactaactctggagctgctaaggataatccttttgatgtgagagtaaatatttttccataatggaatggctttattgtcaggatagattggaaatgtattgcttttttcttaagaaaagttatatattcctatgcataatcctcctctcccaaggaatatttttcctttcaactttatcctattagaaattaatatttagtccttattaaaaattacttgtgctaaagcaacgattttgctgttattagtcatttctactgtttgaatgtggtccatttctgcgatactattttggtatgaagaaaatctgtaaacaggaaagagtttgggtacataggggaaaggagagataccaaagcaagggttgagcaaaagtgaaagggaagtacttacaactaaaaaaaagttggcagcgaagataaccttctgtcaatttcctatattttccccaagaccactaatggccgtctgatagccccatttgactccacagcagggtgtttgcttattgtggggagcagacactttaaaaggactgactgcatacacgaggctggtccgtgtttctcttagatgtgaccttgccctgacaatagtccagagactgattctccattggtcagtgttatctattcttccttcatctctgcacacaatggccctctgcatctttccatgagggcattgctattgccttggggatcacagcagatgcaactgtactcgagctagcagcctcaaagagttcacagttttttttgttagcctacccagagtttcagttttggcttttcagggtgctgtcatgggatacaaacgcatgatgaagttgcgttttatctctgatgcaatgaattttcatggagacaaacttgcagggtttttaagctcagcattattaggaagatgacagcttcagctggtattctttctgtggtgagaatagtccagccacactcatgttacctcaatttgaacaggcaaataggagactgcttcttggcttgaaaagaaggtttacaagatctaagagcttttgttctagttgagatgacgaaggttctctgcatctatgtccctgggggagcccatttttttccacattccaagcacttggctgtgtaatcctgtgcaaaacttctcccaggcaagatctccatatgtattatttggttgctttctctaattctcctcaaacatcagcttagtattcacaataatagctacatttattgagccctttccaaatgccagccactgttctaaaggttttacctgtttagctcactcaatcctcacaaacttatgaagtagatatcatattgcctacattttacagattcaggaaacagaggcagagggaagttaactaacttgaccaggggcacacagcttggcagtgtcagagctgggagggaattccagggagtctggctctagaatttatggtcttgctctccagggattgagagcgcatcctttcagtaacaagtggttgagtaaaatgctattttcaggtcacatttgtatcctaacaagagtcccacacagctaagtctagggaagtgtccctggaacacagctataattcctaatgggcctgaattttaaaaagctttccaggaatgaccattcattttaagaacagtgtggaaggagactggagggtccaatgaagctgctgagtagtaatcaggctggtatctgagacaagactcagaactggttctccaggggcatggcaatataagtctattgtgaaatgtggctttttaatgggtagctggggactccattcaacagccttaccttaaaacagcaagtccgcatattgaatggtttactggtcttggctattttagttcccgtgggtccttagttctgttagctcctgtccttgattcttccatgtcaggataagaagttactgctttaactacaggccagtgtggtcattgtggccactggttcttctgtatctctgtgcagttcgaaatacaattctttcctaagaaataattttgcggtcctaggagaacagtgtctgcatgtgactctcacaatccaccctgaagtgacctctcagtcattgaccacatgttgttggtttctctagaactgacaattacttaaagtcacgttcctagatcacatgttaagccctgcaaggtaaaaaattatgtcttattcaatatattcattgcttattataggtgatagtaaacatgttattttgttttgaccggttaaaatataccagagtctctttgcaagactaacttttctaatatgactgtaatatggataacgaaatagtctaaagggtgtcagttgacatatgtctgagaatcacagtttatttcatatttatatatttcttctaacaaaatgggatacatgtgcagaatatgcaggtttgttacacaagcatacatgtgccatggtgttttgccgcacctattgacccgttctctaagttccctcccctcacctctccacccctcaacaggctctggtgtgtgctgtttgcctctctgtgtccagagaatcatacagttttaaagcttagggtaattttgaaatagaaaaagaacataatgatttataaaatttgatttcaaaaatgtttgaatttttgtgctaagaagtaattactttggtttatatttgaatttactttgctttattcatgctgggtggccttttcttccattaaccagtggttttatataattttcaggtcatatttagtagtttttccacccacatctcccttcttccattgttatacaaaaatataagtggtgttttatcacatattaaaaaatattggccagatgctgatggtgcttttaaaacgtaattatttaattctgagactctgggagagggggcttagatctctgctttgggtgttcttctcagatgcggtgcttttaaaaaaaagtgtaattatttaatcctgagactcagagaaggcttagatctatgcattgggtgttattctcagatgcagagatgtaaatgccatttttctcttctgttttcaggtcacatgtgccaatttaacgaacggtggaaagtcagaacttctgaaatcaggaagcagcaaatccacactaaagcacatatggacagaaagcagcaaagacttgtctatcagccgactcctgtcacagacttttcgtggcaaagagaatgatacagatttggacctgagatatgacaccccagaaccttattctgagcaagacctctgggactggctgaggaactccacagaccttcaagagcctcggcccagggccaagagaaggcccattgttaaaacgggcaagtttaagaaaatgtttggatggggcgattttcattccaacatcaaaacagtgaagctgaacctgttgataactgggaaaattgtagatcatggcaatgggacatttagtgtttatttcaggcataattcaactggtcaagggaatgtatctgtcagcttggtaccccctacaaaaatcgtggaatttgacttggcacaacaaaccgtgattgatgccaaagattccaagtcttttaattgtcgcattgaatatgaaaaggttgacaaggctaccaagaacacactctgcaactatgacccttcaaaaacctgttaccaggagcaaacccaaagtcatgtatcctggctctgctccaagccctttaaggtgatctgtatttacatttccttttatagtacagattataaactggtacagaaagtgtgccctgactacaactaccacagtgacacaccttactttccctcgggatgaaggtgaacatgggggtgagactgaagcctgaggaattaaaggtcatatgacagggctgttacctcaaagaagaaggtcacatctgttgcctggaatgtgtctacactgctgctcttgtcaactggctgcaaaatacactagtggaaaacactctgatgtaatttctgcccagtcagcttcatccctcagtataattgtaaatcatcacagattttgaattcacacctgaagacatgctctcacatatagaggtacacaaacacaccgtcatgcacatttcagcttgcgtctatcatgattcctgttgagagggctttcattgtctgactcataatggttcaggatcaactatcatcaaacggaaggattaactagacagagaatgtttctaacagttgctgttatggaaatctcttttaaagtcttgagtacatgctaatcaataatctccactcatgcattcctactgcttggagtagctgtactggtaaatactactgtaggagtatctgcttgttaaaatggaaaaatgtgtctttagagctcagtattctttattttacaaacacaacaaaatgtagtaacttttttccagcatacagtaggcacattcaaagtggtccaagatggctcttttttctttgaaaggggcctgttctcagtaaagatgagcaaacatttggaatttacatgtgggcagacattgggataacaactttcatcaccaatcattggacttttgtgaagttgacaccagctaaggctgcttaaaataagttctgatcattatataagaagggaaatgcctggcagacaccatgtaagttataagtgtctgtcttatctttactacacatattgtaacaaattcaatatcctagtcttcatttgtatgaatggtttgtattgtacatagtttaaccaagtgttatttgagctgcttattaatattaacttgtacttgtctctctgcttgttattggttaagaaaaaaggatatgaggaattcattttatcaatgtagctgtgaaggccattaaaaagacaaacttaatgtacagagcatttattcagatcaagtattgttgaaagctatacatatacaacattacagtctgtctgtatttagatattttatttctggaaaaaatgaaatgtacataaaaataaaacacttaaagttgagtttcaatatgtacttgtgtaagatggtgatttaaatggttctgacaagaagaatgtgctggaatacagtcctggctttgcatctcatatctctaaatttgtacagaactatctaaactgctgttagttgcccagtcaaaacaacttaagagtttcaatctgaagcctggggaatttgtggcatatagcattgcatacatttttggtttggtgtcatgctagttattcaagaataccaaaaatcaatgaacatcaggagataattgaggtctcctaaattaattatatatagttgaattatttcctgaccagtctttatttagcagaagaacggaagtgaaagcattctttttgctttagcagagtcaagatgcctgaagattgtggctgaattttcctgattatactgtaatgactcaactcaactgaagaaattgtgataacattggagggcttcaatgctcaatttacctatagcagattggatcaactttatatatatatagagagagagagagagcgagagagagagaaagagagagcattgtttgtttatggacattaactttattttaaaaaataattgctgtacacaatctcagcaaaataaccagatgaatagttgctgtacacaatctcagcaaaataaccagatgaagaaatatgggaggtgaccaatttttaaagccacgagttgggaatcggaatttgaattgtttcaaaggttaacaaactatgtcaaattaagaacacaaattcattatcatcttccccttatggtacttagaaataagtctgttttcatacagaaaataatgaaagtactgcaagagaaacaaaaccagagttctaaagtgagaactcaatgaccgatttgattaacgacagtcaactgcaaattgagcactcattactctgttaaatgtccatttcttgaaatgctccaaaatatctagaccatttatatcaatatagttattaattaattaatttaccatggaatttagaagctaatgttagaacggcgtctctttggcacaacaggcagtaagaccttaatgagtcctggctgctgaacatacttgccgtagataaatcttgtcattctggagtttacttatcaaaagtgatcacttaggaattagttggctcttagcaaacatgagagtaagtaagaaaggaaaaaatatatctttaaaggatccttcgattagcggactatgagtctcattgtatggtctgatctgtcattttgtaatacaaaattcaaagtaagataaaaatgtacttcagtctccaaccctctatcttgcattctaacctcccaatgaaatgtagcttatacagttttataaacacacagaacacagctaactaacattcatagactgaaatgttttactgagattttctttagaagaaaaacaaaataagaagaaaagatgtagcaaacttccaacaagcattttaattttaaaaaatccaaaccttcaggacccttattctggg

SEQ ID NO: 416 - DNA, 700636 bp, Homo sapiens
  source 1..700636: mol_type = genomic DNA
cttgtagataattctcagaagtgtggagttcccgatgatccccagcacgaacacaaggcaggacacaaccgtgttgatgtatttgaaagtctccttgatctcgatgggtccttggcacgggggaggggagatggtgcgtggcggagatcctgccgtcctgtctcctttaggcacctccgcaggtgccaacgaccgcgccagactggcgttggaacccttgggccataaggtcttagtgggtggcgtcattatctctgcggtttgcaaaagcggagtggccctgtcaggcgggaagcctctctcctctccccagatccgcgacaggccgcaggcaagaaccagcgcaaccagggcgcgtccgcacagacttggaggcggctgcatgctgctacctgctccagaaggcgtccggtggccgctccgcagtttcagagcctagagacaagcagaggaaggaagacaggacacttgggtcagctgcccgagccaagtcgctgcaaacgctaataccgcccgcagcctcttcgccagtatccacgctcaaaagtaactcaagtttgcgcgccagtgggaaacttggcgctcatgactcgccagcgcgggtcgaaactccttcctgatgccctctcagctgtttttcttcccccgcgtggccaggaggggtaaataatatgcagtggggcggggcgttctggaaggggtgtgccagggagggaatgatgggggtcccaggcaaagctccgaactctttcacgtaacgggaggaatacagacacgtcttagttaagcgtgcgtgggaaccgcggaattaaggcacctagaggccaagggcttgtgtcaagctctgcattttgccccgcaggggaacctctataccccgcgattgaactcgaaagactcctcccggcggatgaaagccgctactccctggctggctgagctacagctcccgcagcgcgcccaggagtgcgccggagattcggaaacccgcagagacttctcaagtcagcaggaacttggaaaccgctgttccctccaaacggcttcaaacactcgcgctccttcctttacccaacctaattttaatttgccctctctataggcttaatttttatttttttaaaatcccaaactagtaagccaaaccgaagccccagaataaggttcaatcaatgattttaattcaacaccaagcccgaatgtttacctctcggatctgacaaaccagatgcagagcgacgaatggagaccaccttcccgggaggcggaacccagctgggttccagcctgctctgggagaggagcacgcctcccttgagctgcaggcgggtccggctctgacgaaacgctgcgagaatgccagacagtgtagcctccaccgtttgctcggggtctctgctgccatcagacaagtacttttattcattcatcccttcccatcaatcaccgccagactcctcccgcgccttccgaccccgctgcaacctttccccttgggcgatgcctggacagcatcagtagtagttgcccgagggaggggggcagtcctcgtccggggacaggtcccaaaaggctgtttatttgttagagttctacgctcttcaaatgaacccaaatcaagggcaagttatcacgcaccatgtgacacccggcagctccagactagaacaaggctctgcactgaacgtgataattgaacttttaatgccaagtgtcacttttctttcaggtaaatgttccgccgctgtgatatttaaggttggtttgtgggcgctgctctttgctctgcttcattttgccctgaagtttcatttcaagccaacattaaccccaacacggaacagctcgatcttttcttcccaggccctctcactgccccgagagaggattacaagtactcctcattttccccagtacagctcttctcctctcttcctgccacagtatcggtgttaggcaatctcaggcatttttatactgtacctatgacagacttgatgcttatcggagacatgaaaataatcagaaagctgccatgcaaattcaacatgatatttatttaccaggtagagcaatacaataaggtctttctatccattcttgagctccatgtttaccgcagagaggaaaataacagcgactggtagttttgcccagagattgtataaaagaggtcaggaagtcaggcttggagatgcactggagagtactgtgccgtcctccaatcagcaaaatccctactggatctgtggaacttcaaacccagaagcacccattccatgtagcagtttcacccagagacaggaggctcgttttttgcttcatgttagttaatggaatagatgggacaagaaccttggatttttggctcttaggcaatgctttctgggacagtggaagtagaaaatcaatttctatttaaaaaggtgaactttaagtgtgaaatgtggttaggaacatggttacggagtaaggctaaaggaatgagaaatatggtctagggttgtgagtgctaattccaaatctggctattttgaattgcagtccttatcctccctgtctcgtaagaacgaggtcaacattcaattgctgagccaagtaacaatatacaatgttgtctgaataaggaattatatggaagctttggaatatgaatattttgcttagttgactccacccagtgttggatctgcccttcctatacaagctttgttgggttcatgcctatggctcctgtggggtgacttttctctctccccactggccttctcatcatctccatctccattcaaatttcctccactgagtcctggaagtctgctctaatcctcactgaggtctatctctttacttttcttggagcacttttggactgttaaccacaacttagcaagcacttgatcacataagagacatctatgggtcactattgatttcgtgtgacttaatttcttttacaggacagggacttgaatgagttatatgttctttctgcaccatcccactacctgccacaaaatgagcttaagaaatattttttataaattgataatgatattttaaagtattcagttatactttattaactggtcattgggctcaagaataaggccaaacaattttaaggtaaatatacacattcctcatttggaatttaaaacacagtatcagctactccttacagggtctaccacctgcattagacaccttttcacagtacctcattgattctctgatgtttgtcttccagctctgtattattttctatgatgttataggcagtgaaactgagtctcagtaattcacttaaggtcatgtggctagttagttgtgggaccaggatttggagctaggatttgaatgcatgtctaaatggttacacagactatgctttttattattgtaattgcagaaagcctaagcaaatttttttcttattttggggaaacagtgttctagacatcagtaatatgcaattgaagtttaaccttaaatatttcaccttaacatgtaaagacaaccatgtgaaatgtaaagaattgttcattgatcttcatgaatgactgggtgtcagtttccccttttgtaaaatggaagaaaaggattaaagttacttcttgctccaataaatcagtccgactgacaaactgcctctgtaggagtgtcttaaagtgcagaaaagtggaaacagattctaggccaatatttttttttaatgttactttcattactcatgccttgagcagtactgctatggatatagtttttttttcatcttattacttaaaatctgttatcgataaattttatttatgaattcactagcaactaactactatgtaaatttcacttctatatatgagcaaaaagttgtatcaaattttaagaattcctacctgcaaacttgtgaactaattttgcatttatgagaggattttttttttttggctaggtaaatgtggagtcttttacaaagttgcttattttaaacgtttatgaagtgtctaggaaatctatcaaaattccagattggctaagatcacttctcaaagttagaaagttgaagatagacaatgtcccagtatttcctttaaatgctttatctagaagttcctgaagacagggtttaatgcaattcggaattcatttctcaaagaggtttgccatggggagcattcccaaaataaaccttttcgcctggtgacagaacaaagaaaagcccttttagccacacaaaaaagttagtactttcatgtaatcctcttgaaatgaatgtgccctcaaaacctatgttgaactctctaaatcatgaatgctgagagacaaggtgtgcgaaaaacacagaaagagttggttcaactggttctccacatattcctctgggaccagattcaatgatcaaatagtggttgaagtaagagaataaaaaagttttaaagtgactgcaaaagtcaatagcaaacagcatgagaatttctatttcttgagttttcttttctattaagtgactgtagctatctggatccatgataaagaatcttttttaattaagtataatgtatgtacagtgaaatggacagggcttaactgcagcttgaagagttttgccaaatgtttgcaatcctgtgacccatacctaaggggctctttgaaaattcatttattctttaaaagtggtaaaatttgaatattttagatttggacgctattcctgttaaaacgctcattaagacactatttctgctttatcaacttatctgatacatcttatcagcttctataactaaaatgtcactcataaattagaggtgtgattaaatgagagaatctgacatttgaaacgttatcaatgattgcttgatggtaccaaattacacttcattccctgatgtaattaaaatttgataggtttaatgtaactagaaataagacttcattaattcttttctgcctatagaaaatatgagaaacagacaggatacattctttttttctgagaaaagcaacatagttcagctattttaggctatggtctactttaattaaaattagacaataatttgctttcctacttataacttaagtaatttttatattcctttctttgacatattttttttcaccaatctcagtaaaacaaaaaatgagtgtaacctggtctacaaacttcttaaaactgttcacagaacttttgtaacaactttgaaaagatattagaaattccagtctaagaaggcagtcggacctgtgccgtcttggtttgtcaatgcacactgtatttattaaattattcttaggccactcagtaatggagaaaacactatcattactgtatgtcagcacagtcttatcatgtgtaatgcactctttggggagttgttatttcatatggaatataatttataatgagtttatgtattttctgtgactctaattgttttctttaatttttacctttccttgtttccattcttttgatacctgaatgaagtgtccaaagagatgtgaaatagtcaaaataggttagaaagcaaaaagaaagagaaacttggatctttagctatttactggtaaataaaagagaggtactttttttttttttttaaagaaagtaaaagttatttgtagtacagaatagaatgtgctaggagagtccaaaaaggagaattcccacagcaggctttttttcttcttcttttgtttttaacaactgtacttaatcaatgagatactttaaatttcatttctgctaattattaagctctggtaatggaaataccttttaatcaaaatctgccaaaatctgtaaaaagtttccgattatgctttgagatttaattgtaggggaatagaactatttgtatgaaaatttaaagggaaacaatgattttactgagtgtttatttactatacattagatgaacaatttaactttcaggccaagagtcatggcatgcttttgtcaaagcgagggatcatctggggcttgcaaagccatgccaatttcataaggcgatttttgcttatctcttttagtgatgcatgtatagcaaattgcttcttctcttttgggccctgctagagagaacaattattgctatccgtgaagaaagtgattctgaaatggctttaccagctgtgaattatccaaagaaaattactcacagaatctcatgggaaatgcacaggcgacttacttcttatgagggcagcagataatgcaaagctggcatttgagggggacatggccaaggtaacaggtgccaagtaccctgcagagaggtaggcagaatatagaaatgggaaatccaagaagcggttaattccttgagtatcttttaatgtggtaaaaaaacacataatataaaatttaacatcttaaccattttttaagtgtacacttcaattgtgttaaatacatctatattgttatgtaacagatctctgtaactttttcatcttgcaaatttgaaatttgctattaaagaatgatatggtttggttctgtgtccccactcaaatctcatctcccataattcccatgtattgtgggagggacccagtgagagatgattgaattatgggggcaggtctttcctgtgctgttctcgtgatagtgaatgggtctcacgagatctgatggttttaaaaacgggagttgtcctgtacaagctcctttttgcctgctgccatccacctaagatgtgacttgctccttcttgccttccaccatgattgtgaggtctccccagctatgtggagctgtaagtccaataaacttctttcttttgtaaattaccctatcccagatatatgtttatcagcagcctgaaaacggactaacacaaagaacaactccccatttcttcctccacccaatccctagcaaccaccattttaatttctgcttctatgaatttgactactttagaaatctcatacaaatgaagtcatactgtacttgactttctgggactggcttgttttatttagcttaatgtcctcaaggttcatcaatggtgtagcatatgacaggctaaattatattatttttaaggctaaataatatcccactgtttgtatatgccacatttatcataagtctgcaaatacctcttttaattcttttctccgtagatccagaagtgggattgctgaatcatatggcagttctattttttaatagaggtatttgcagactcatgatcatggcagcaccattcacaacaaccaataggtggaaacagcccaaactttatgcatggatgaatgcacaaataaatggctaaaaggggccaacatgcagctcaggctgtgccttcagagggtggaagccctaagccttggcaccttccatgtggtattgagcctgcaggtgcacagaagtcaagaattgaggcttgggaaatctctgcctagatttcagaagacgtgtggaaacgcctggatgcccaggcaaaagtttgctgcaggggaaatgccctcatggagaacctcggctaaggcagtgtagaagggaaatgtagggtcggagcccccacacagagtccctactggggcaccgcctactggagctgtcagaagagggccaccgtcctccagaccccagagtggtagatttaccgacatcttgcaccgtgcgcctggaaaagacgcagacaatcaatgccggcccacgaaagcagccagaggcgaggctgtaccctgcaaagccacaggggcagagctgcccaagaccatgggaacccacctcttgcctcagcatgacccagatgcgagatatggcatcaaaagagatcattttggagctttaagatttgactgcccttttggatttcagacttgcatggggccggaagcccctttgttttggtcaatttctcccatttggaatggctgtatttacccaatgcctttacccacattgtatctgggaaataactagcttgctgcacacagcatggggaccctgggacattttccccatggtctttgggattaacattaggatccttgctacttatgtcaatttctgtagccggcttgaatgtatcctcaaaaaatggaggagaaagaaaatgggtttttcttttctattgcatcgtcaggctgcaaattttctaaactcttatgctctgtttcacttttaaaatggaatgcttttaacagcacctaagtcacttttgaatgctttgctgcttagaaatttcttccaccagataccctaaatcacctctctcaagttcaagttccacatatctctagggcagggcaaaatgctgccagtctctttgctaaaatataatgagagtcacctttgctccagttcccaacaagttcctcatctccatctgagaccacctcagcctggaccttattattcatatcactatcagcatttttgtcaaagccattcgacaagtctctaggaagttccaaactttcccacattttcctgtcttcttctgagccctctaaactcttccacctctgcgtgttatccagttccaaagttacttcacatttttgggtattttttcagcaatgccccactctgctgttaccaatttactgtattagtccgttttcatgctgctgataaagatatactgagactgggaaggaaaagaggtttaattggacttaaagttctacatggctggggaagcctcagaatcagggcaggaggcgaaagacacttcttacatggtggcagcaagagaaaatgaggaatatgcaaaagcagaaacctgtgataaaaccatcagatcttgtgagacttactcagtaccatgagaacagtatgggggaaactgcccccatgattcaaattatttcccgccaggtatctccaacaacatgtgagaattgtgggagtacaattcaagatgagatttgggtggggacacagaggcaaaccatatcagtatataagataagtacatccctatctatttatcttctctggagaggttgttgttgattacctagttatctacttctcatagtagacgcctgagattcaagcatcactgtgggatcattgagccctcaggtcctagatctagatgcttgagtaagttcagagaatccaaagctgaggtaggttgagggctggactattgaactttatcctgtcttgttctagattaacacagtgactgggcttgcctgaaattatataagaagagtacaagttgacccatctgggggtgtgaggttgaggaagtctgtgtctaggaactagaacaaagttgggtactcatgataaatttaagacaaatttccgctttttgacaatttggcaagaaagtagacctgatatttaggtgaatttgacaatcaggaacctgatataggtgtattcatatttttccaattccaaattagttggaaaagtcagtgaatgattatcattactgggatgctttgcatgaaattcgtccacagcaagagctgtaacatatttagactgtcacaatttctgttcttccagtatctttatccattcattaatctagatattcacaaggaataatccatagcttatgatagagtcaaatatttgtaagaaaagtgttcttattactcaggtattgataaggtctggctgtgtccccagccaaatctcaccatgaattataataattcccatgtgcatgagagggacctggtgtgaggtaattgaatcatgggggtgagtttttcccatgctgttctcatgataatgaataagtctcatgagatctgatggttttataaatgagagttcacctacacaagctctcttgcctgctgccaagtaagaagtgactttgctcctcctttgccttctgccatgattgtgaggcttccccagccatgtggatctgtgaatcaattaaacctctttactttataaattacccagtctcacatatgtctttattagcagtgtgagaacagactaatacaggtacatttaatcatttgtatgcaagcaaattagacaagtaattaatgttttataaaaatttggaggaataagacatcacttttattatatatatgagtgggggcttacttcatattttattatactatcatcatattttaaagctgtactgttaaccactgtcttatatcaagaagcaagtaacctgatatttggtgattttgattttccactaagaggtacacttaggaaatatttcattccctttatttatcacagggtggtttcagtattgttaccaaatattttgtacatattttttcatgatactatttttttggtgtaaaattagctaaagaatatgatattttaaggagtttcgttttcaagaggaatgtctttcctgaaaatgtttaccactggagggatcaacaatgtgtttggcttaaaattagccctaacaacacatttaagttttttaatctaaaatatataaatgccaatgaatttgccagaaaaatacaactggcctttttccttcagaattccagacataacacagcttctctgaagtcaagagaagatcaagtctgagaacaatgctattcttacctttactctagggaaaagctgaatttgctctagggataagaagcaaagacaaaatgccattgtcttagtgacgttttcaccaaatcatttaagaagaacttccaaagtatttcccaaaatatgtcaaatgcttaatttaaaaataacaaaaaacatcttccaacctctcacttttaaatcattttttatagtgattaaatttacttaagttctaggccattaacaaaagatgaagtggcatccaaagtaggcattttcagttgagaaactcagtcctatttaaacgttcatcagctataaattttaggttcagacgttgatgaaggtcaaaaggttagtgattcatttcctgtacttgtcactctgctgcttgttatgacacatttctggaagtgactgacaacagaaataatcactcaaaggtctcaattgtgtgacatgagcaaatatattttaggctccaaaccatgaattgttttgattattagaaatcctcatagcatacaaataagaggaccaaaatatacagggccttatcttcccaaacagtcatctataggacatagggagaagaaggaaagataaatgtataaggtctggtcatggtagatgcacctatccatctatacatatgtgagaatattctttgatatttccaatattttgttggcatcagcttgatctcataatgtaacgtatgtcctctttaggtggcctttattttcctaagagaacattatcatagatttccccttctgtaactaatagttgccattaagatttggggactaagatctgtctatgttagagcaatgaaatatcagctatcttagttcttctgaagtttagatgctggttcatgccctgaaaacccatttgtacaaggcgggtgactattccaacactttcatgctaacagccttccacttaaacctctggtcaagaaacaggaaagaatcatgcccttttgcaaggaaaggagtctgggaaagaggagagcatggacttcaggaacgctgactcctggccatttacctacctgagaagccttatgcaaatcattttacctcgatatatcctctgggtaaaagaaagagtaagaatagtgtctccattgtgagatttaaattctattatgtttgcaaatcattcagtatagtgcgtggaatacagtgattgtctaggaaatgtcagagatcatttttactaatatatgttctggtttctggaagataataagaagagaacaccatcagacctcgtgataaactttcttagcaaaggtgcaggcttggaatggaattctcgtagttatggattgattgaaagctaagtttatgcaattattggcattggtggttatgttggattgcctttttttttgatgatcaactatacgaggagcaggaaatgggcaggactgactgcctcagttgttggtttactggtctgcaaaaacatggttcaggtctttatgacaattcaacaataagcacttgaaaataaaccaagaaaactgaaagcagtaaaaaatagtttagtagacagaagattctgcatcacatacagagctacatagattcagatgacttgtttatttcaagaagttcttaaaatgtacttacatgcatgaagtatgttcccaagaagctactttcagagagggttatatggataagtggtctgtgatagtatcagttttaattattacttcagaacacctcttcttaatttatatttaatattaataaacatttatgatatggaaccaaaaattagcatgtctgatttcttaattatttggatgtttgttctcaagaagacaatagtgttgtgatggagagatggtttcaggtaggaacttccacaacagtagacataaaccatgcacattagtgcagagctgaaactgaaatcatgtcagaaatgttgagtttgtaacttattaacttttgaaaagtacatacaacaagctatttgtaaagctcagcatttattgatatatctgcaatatgccaaaatagaacttctggcaactctgaaatgttctcagaaataatgagttttggctaaatgcatgcagtgcctgaagtttggtctttgaggagtttaacacgcacagctgggtctcgttaatggtgccagtggaatttgtagcactatctattttatgacacttccacacctacttttaccttataaggtaaagacccaaactctaaatgtgtattatccataggcctatatttaacagcaaaataatgatttttgcaagccaaagagaaacaggaattcggtctccagatgctgtttttgaaaagcggcatctaaatagttgctgcccaatgtcatgatcatgttgtttactaagataatttcagcctgttttactaaagccatcgtgtaaggccagatttctatttttttaataatacatctaaaacagttacatgtgtagttgagactaaaataaaaataaagacattaatggaaaggctgagttttattagagtttgtatttaaagtcacactcccaaatctgcctttccttgcattgttgaaaaatttcacaagttttctataagaagtcaagtatttttttttaaagtttgaataaacctgcttataaatgacattcttggaaaaactttggaaatagtctcccaaagactatttttgtatgatataatccagccttactggctgtagctgatcggtgggggaattacctgatccaagctttcctctcaaggaccttctctgaggtggttttgttgttgtttgtttgttttcaaagtagatcagagaaacacttttttataggagacatcagtggcctctaacaaacgccagggcgtctaattgtgtcagtgcacaattagaataatgtaatcaactaaccaagagagggagagaagcactcttgctgaatttgagttccttcttccagccttttttgagtctcagctacagctctatttttccttagcattgaaatactgtagtagcaaaaaaaaaaaaaaaacaaaaaaaaaaaaacaaaaaaaacctcctctttttatcaaattattttcagtagggcatttttcaataggcatagcaatgaaaatagttatgatttgtgcaaaaatcatgaataagaactgcacgaattagctacagctttctttagcaagagatagtagctcacaagttagtttttatacaactgtttctgtaagatttaattctattttctacaatacaaagaaaagataaagtaatatttgaatctggttttacaacatagacttaattatgttggtgaattattaaaaaaaaaaaaaaagtgaagaaagagccagttgagactaggttaggaatagacccaaaactggagaagagagaagtcttgtcttttagacactggctgcctcggaagaggaagatgaaagagggcacacatatgagggggtgaaaccaggactggggaccaaagatgctgaaagtctctggagtaaagtggacatcaaagacagctttatgtctttttcaatcttttcagtgtctctccctggatcaaatttatcagaacatatctatgtagggacatgttgaaaagatatgggaaatacccatctttatggctaatttaacacgatttattatttaaaacaataatggtagaagtggcttccatctattgagatctcaatgatgtgtcactccctttatttatttatgtctactttattaaagtcttacaaaatccctgtgaaataggtattatttctacagtgttaaacatggtaataatactgaggctcagagaagcctgtgcctatggctacagcgtaagacagacagatctgggaccttagaccaagtccatctaactccagtctcacacttgtaaccatatattttggacattgaaattgcatgtgtatgtccagtcatagcttctttgcctgcttttccttgacatactttttgaaaaggactataaataatcaagaccaaaaatactaagtgaatctgttcaataattggtgtttgccaaagccgtttttctttcaatcccattttaaacagagctcaactttaatgttttaattacatgcatttctagttcaattcaaatctctctaagattaaaacaaatgaataaatcaggaagcataatgacttttggagaatgtccatttataataaatctgttatgaccaactaaagaacacataacattaaaaaagcaaactttgctattttgccaagcattaaaatatgcaaatttccctcgtgctgtgttatatatgtttaagatatgttgatgacatgggctattttgaaatctctgcaaatatcctttttaggaaatatttgtttctgtagcaattctaagatactagcaactcatatgcccatttcaaaacacctgtgaatatcacatataggttacacttcaaaatttaacttgtggaacttttattctggtgagcagagtttcatgcgcgtccgtgtgaagagaccaccaaacaggctttgtgtgagcaataaagcttttaatcacctgggtgcaggcaggctgagtccgaaaagagagtcagcgaagggagacaggggtggggccgttttataagatttgggtaggtaaaggaaaattacagtcaaaggggggttgttctctggcgggcaggagtaggggtcacaaggtgctcagtaggggagcttttgagccaggatgagccaggagaaggaatttcacaagataatgtcatcagttaaggcaggaacaggccattttcatttcttttgtggtggaatgtcatcagttaaggcaggaactggccatctggatgtgtacgtgcaggtcacaggggatatgatagcttagcttgggctcagaggcctgacattcctgtcttcttatattaataagaaaaataaaatgaaatagtggtaaagtgtgaggatggcaaaaattttgggagatggtatggagagataatgggcgatgtttctcagggctgcttcgagcgggattaggggtagcgtgggaacctagagtgggagagattaagctgaaggaagattttgtggtaaggagtgatattgtgggactgttagaagaaacatttgtcatttagaattattggtgatggcctgggtacggttttgtatgaattgaaaaactaaacagaataaaagaaggagaaaaacaggtattaaaggtctaagaattgggaggacccaggacatctgattagagagtgcctaaggaggttcagcatagccttgccagcaaagattatttatttactttaagagttaagagtggcggtttggggttagcaccaagagatatcagctgtgatggcttggagaagcagcgtaaaccatcagtgtaatcaagagcagggcatgtatgcgtagttgagaacggtcaataggagtatgactagagagaataaggagtgtccatacaggagcttaaatgggctgtaccttgtagcattccgaggacaggcctgaattctgagaagggaaagtggtaaaagtattgtgcagtcctttttaagttggtggctgaacttggtgaagtgtgtttttaaaagacctttagtccgttctacttttcctgaagactgaggaccgtaagggatataaacgtttcactggatactacgagcctgaaaaactgcttggctgatttgactaataaaagccggtctgctattagactgtatagaggtgggaaggccaaactgaggaattatgtctgacagaagggaagaaatgaccacggtgaccttctcagaccctgtggaaaggcctctacccatctagtgaaagtgtctactcagactaagaggtattttagttatctgacttggggcatgttagtaaagtcaatttgccagttctgggcaggggcaaatccctgagcttgatgtgtaggaaaggggggggggggcctgaatagtccctgaggagtagcagaatagcagatggaacactgagaagttatttccttgagatagatttccatgatggaaaggaaatgagaggttctaagaggcaggctggtggcttgtactatagcatagcctggctttgctggtgtgtggtgattatgcctggtggaactgccatcaataaatcaagcgtgatcaggttgaggaacaggaaagaaggaaatatggggaaatggggtgaatgtcaggtggatcagagagatacagtcatgggggtcaggtgtggtatcaggaataatgtgggaagctggattgaagtctgggccagaaacaatggtaattgtgggactcaacaaagagtgagtacagctgaaggagccggggagcagaaagtatatgtgtcaggtgtgaggaagaaaatagattttggaagttatgagaactgtagagagtgagttgagcatagtttgtgattttaagggcctttaaaagtattagggcggcggcggccgccacacgcaaacttgagggctaagcaaaacagtaaggtcaagttgtttggataaaaaggctacagggcgcagtcccagttcttgtgtaagaattccaactgcacagccctgcactttggctgtgggtaatgaaaagggttcagatgagtcagggagagctagggtgggggcagtctctaaagctgtcttcaaggaatgaaaaagagtggggaaaggatttaggatctatggggtcagctaggtttctttttgtgagtttatataatggttttgttaggatggcaaaaccaggtatctaaagtcgaaagtatctaaccatgcctaggaaggaaaggagttgttttgtagaaggtgttggggtttgagagatcagtcagacacaataggcagggagagcatgtgtgtgtttatgagaattacgccaaaacaggtaacagatgaggaagaaatttgggcttgattgaagtaatgggggctgtctgtgaagccttgcggcagtacagcccaggtaatttgctgagcctgttgggtgtcagggtcagtccaggtgaaagcaaagaaaggctgggatgaaggatgcaaaggaatagtaaagaaagcatgttagagatccagaacagaataatggattgtggagggaggtattgagaataggagagtatatgggtttggcaccatggggtggataggcaaaacaatttgattgataaggcacagatcctgaactaacctgtaaggcttgtctggttttaggacaggtaaaatgggggaattgtaaggagagtttataggctttaaaaggccatgctataacaggtgagtgataacaggctttcatccttttaaagcatgctgtgggatgggatattggcattgagcgggataagagtgattaggttttaatgggatgataaggggtgcatgatcagtcgctaaggagggagtagaggtgtcttatacttgtgggttaaggtggggagatacaaggggaggatgtgaaggaggctttgaactgggggaaaaggcggcaatgaggtgtggctgtagcccaggaatagtcagggaagcagataatttaattaaagtgtctcggcctaataagggaactgggcaggtggggataactaaaaaggagtgcttaaaagagtattgtctaagttggcaccagagttggggagttttaagaggtttagaagcctggccatcaatacccacaacagttatggaggcaagggaaacaggcccttgaaaagaaggtaatgtggagtgggtagcctccatattaattaagaagggggcggacttatcttccactgtgagaattacttagagcatctgtgatggtcttgtaggcttccgaggcaatcaggcagtgtcagtcttcagctgctaagccgagaagatctgggaaggagtcagagagccttgggccagagttccaggggctgtggaagtggctgccaggtgagttgaacagtctgattttcagtggggtcctgcacagatgggacatggcttaggaggaatcccaggctgtgggcattccttggcccagtggccagatttctggcacttgaagcaagatcctgatggaggaagtcttgtaggaatgcttgactgctgcggcttaggcgtgtgcagcttaggcattttgaagttcttgtatgctggaggtgtggctgggttttgtctcacagcagaggcaagtaattgtaactcagaaatgcattgccgtttggctgcttcctattattgtacaccttgaaggcgaggttgattaattcctgttgtggggtttgagggccagattctaatttttgaagttttttcctaatgtcaggagtggattgggtgataaaatgcatattaagaataaggcggccttctggcctttctgggtctagggcggtaaagcgtctaagggttgctgctaagtgggccctgaactgggctgggttttcgtctttaccttgggtagtttctttaagcttgtcagaattaacaggtttgtaagctgcctttttaagccctcaaactaggcaggaaatcatgtaatcttgtctagctatacctggggaatttgcctgatagttccattggggatcctctcagggaactgctctaatgccttcctggaggtctgactcgtgaagccagcggttatcagcgtgagattgggctagagaaaaaactctttctctttcatctggggagagggtagaagtcaggatgacatttaagtcactccaggttaaactgtaggacagagttagatattggaattcctgtatatatttaatggggtctgatgagaaagagcctaaatgctgactgatctgagagaggtctgatagagaaaaaggtacttgtactttgactatgccttcagctccagccacctctctaagaggaaattgttgggcaggtgggggaagagctagtcgtgggactaaactgtaagccggaccaaatgtgaggaggggaggtgataaaaggattatagggtggaggagcagaagctgaggaagaattgggacctaccttagcctggcgatgaggggagaggtcagatgggtctgtagaaaaggaagattagaaagactcagtgacgcttgaggttgggactgaggggacaggcaggagggaaagaaggaagatttgggatgagctgcatcgggaacagagactagggagggactgttgtgtaaaagaatgcctggatgtcaggcatttcgactgtttgcacattttacgacaagaattatttagatcttgtaggatggaaaaattgaaagtgccattttctggctatttggaacaactgtcaagtttgtttggggtcaagcggcattgcagaagaaaataaggcatttaggttttaggtcaggtgtgagttgaagaggttttaatttcttgagaacacaggctaagggagaagcaggaggaatggagggtggaaggttgcccatagtgaaggaggcaagcccagagaaaagagagagtagagacacagagggaaagggtccgggggttcttaccctccagaaaagcgggaaaggagtcagggcacagaaataaggggttggggcgcagagattagaggtcacagcagagaaataagggatggggcacagagataagaggtcggggtatggaaattagggattggggggttcttgcccccagaaaagcagagaaggggtagagacacagaaagaaggggttggggggttcttgtcccctagaaaagtggtacttgctgctaagggtgaaggagaaggggttggggggttcttaccccccagaaaagtggtacttgccgctaagggtgaatgaccaaggcaggcgtccccgcgtggtcagacacctctgaaacatgggtgaataatcagagaggcatccctgcaatgattaaacaccaagggaaggctgccttcccaagtccatgaccagcgctggagttttggatccacagataaaacgtgtctcctttgtctctaacagaaaataaaaggaattgaaattaagagaagggagagattgaagggtggcaccaagattgaaaggagaaagtggttgagggatagtgagagaggttggagaagacagtaagaagaggccacttacccgatttaaaattggtgagatgttccttgggctggtggttctgaggacccgaggtcataggtggatctttttcacagagcaaagagcaggaggacaggggattgatctcccaagggaggtccccctatctgagtcacagcaccaaatttcatgcacgtcagtgtgaagagaccaccaaacagggtttgtgtgagcaataaagcttttaatcacctgggtgcaggtgggctgagtccagaaagagagtcagtaaagggagataggggtggggccattttataagatttgggtaggtaaaggaaaattacagtcaaaggggggttgtcctctggcaggcaggagtgggggtcacaaggtgctcagtaggggagcttttgagccaggagaaggaatttcacaagataatgtcatcagttaaggcaggaacaggccattttcatttcttttgtggtggaatgtcatcagttaaggcaggaactggccatctggatgtgtacgtgcaggtcacaggggatatgatggcttagcttgggctcaaaggcctgacacagagaaatagttggaatcctaaatttggcactttaaacttgtttgatctttagaaaattctctaatttgagttttagtgttgtcatgtgtgtatttgccaaaataatactttcttcataaattcattgggaagattaaatgaagtcatgaatgaaaactgctttgcatgttgtaggtgttccatgatgcctatcttaaaaattgcttgcaaattaaatgagataatgatgctaaaggattcatacattgtaagcactcaacgaaaatatctgattctctttcctagatgttttttatattatggtagcatgctggacttaaaattcttatgtatgggctgggcgcagtggctcatgcctgtaatcccagcactttgggaagctgaggtgggtggatcacaaggtcaagagatcaagaccatcttggccaacatggtgaaactctgtccccactaaaaatacaaaaattagctgggcgtggtggcacgtgcctgtagtcccagctacttgggaggctgatgcaggaaaatcactggaacccgggaggtggaggttgcggcgagtcgagatggcatcattgcactccagcctggcaacagagtgagactctgtctctaaataaataaataaataaataaataaataaaataaaaataaaaattcttatgtacagacccatgttcttataaaattcatgtcatggttgtattcactattaatacagttattcatttgttaagttattcagacatttgtgcaagcgaagaatattaattaaccactgtattccaggtgctattctaggcactgggggttgaatgaacaaagaggaatgacatatgagcttcactataagagattcattggaggtgtgtggtaaagatatgaaaaggacagagggaagacataaaagaggaaatggttaaatttaacctagagaagagtttaatttttttttttcatagagaaggtgataatggggctcagctataaaatatgagtagatgttctccaggtaaaaatggagataggggatttcagaaaaatggaataccttcataaaattttgaaatacataaaaccctctcatcttcctgggaaatttaatctcagaatgcctggaatggcaactagaagatggagttttagtgcaataagtctggcaaagtagacgtggagaaacaggaagctctaatacaccaacttaagatgactgtggtttacctcttaggcatgagaagcatgtatactcacactgcgtgttatgaacagattagtttgtcagaaaatctcattcaaagccaaggaaaagatgaattgggtgtgtgtgtgtgtgtgtgtgtgtgtgtgtgtgtgtgtgtaggtcatgatgcacaaagagcagttgggttaaaattgccacagtctatgagcaagataaagagactttggcttggaatatttgaaggggagatggaaggaggttaagcgtataatttatgattcagaattcacaagatgtggtctctgtgtgcgagttgaaagggatgggaacaggatcctagatgccattctggcatggatccatgttttatactattgattaagacaggaatcctagaaatttttggaaagctacaatgatttcagttttggtctagtttaatttatgatgcctgggagatacctaggtgtgatatctggttgaaacctggaaatgtgagcctgaagctcataatatagttcttagacacagatgcatatttgggaattatccacaattaatttgtacagggagtgagtaaagaaactatcccgttaaaagactgagaaggaagaatcaaataaaaaagagaagaatcagagaagccaagggagggaagagattcaagaagtagtccagaggttcagtgtgataagaattaagaaagtcattggataattttttttaactaccaataggcactcataattatttctaaaagtcttactagaagggaagggatggtatggttggtttgtctattctctgttctgaggaaataaatgtaaatgaccagagttcacaaggagccacagttacttgtattgcactatcatctactctttaacttacataatgaccagattcttctagtgatttatcaaataactaacactttcataagttcacaaggttcttctctattagctagctcattttcctcacagcagcttcatatctattttacagatgaggcagtttctcttaacaggttaaatgagggggcacaggccattggaaaggtggaacagaacgatggtttaacactttttcaaaaggatgaggagtggtggtgatggaagttttctaagttggacagtaggacagggacagttgttttatattttggaatctgtttggcacataataaatattcactcaacatttgttgaactaatgcttaaataaagcaaaagccttgtcgagaatactgagttatatacagtaccattttgagtaaggagttataggagatgtttagtattttgttactattcataaacatcagtgcagagagatggaagaatagaaggctttgtcagtattatgaagcagtctgataaaatttaaacattattaaccactgcaaccagctatgctgacctgcaaatgttctgcctgtcatgtgcttacctctgatgtcaattcttgtgctttgtctaaacaaaaataaaatccctaccacctttttcagggaaccagctattgaatctttgtgccttccctctgctgtctcccttgcacttgagcacaatccctgaaataaaagccttgtctgggaaaaaaaaatttaaacattatttcataaagtgcttccttactgtttggtattatattatgaagaggaaaaaacttgaaaaataatatcttacatttataaagtgtttacaaacaagccttgtttctggtgttctgtattacctcatttaatcttcacaacaacgctgaaagatggttagttccagatgaaacattttagagggaaagaggttaaatatgttgcctaagcctgcacagaaatgaagctgtgcagagatgaagccaagaaacctaaatccagagcccacacattagccactagattatacatacttctcagatatgccaaacagacttttcataatatttcgtcttttcttagattgcatcacattgcacccaattaataagcgagacgatttgaatcatttatagcaatatttacaccaaataaaggccaattggcaatatgcaaacaataatttattcaaccttagaaataactgtatttacccatatctaacatctagataaaactacataatttataatttttctattaattaaaaatatctatatgactcataagctgctgattcaaatcaatgaaaaaaatgaaatagagaaaagaagcattttcaagaacattgttcttaagcgattattatttgttttctaaattatataggctttttcttaacagattcaattattcttaaagtacttccctctacttatagtaatggataatattagttcagggaatattatgtatttgcaaagatctgcctaatacatcataaattgtttttactagaataaaatttctctttttgacagaaacgtttagcctgccatttaaggcaatatcagtctaaaatagaaatcaattcctgacttaagttattctccatattgtagtcattacattccagtcagagtctattgtctccttccataaaagctattctttgatttaaattgcctgaaaatgtataaaaccctttcctgtagagcaatatgtgctgtgtggatatagtaattgacttacctaaattatctctggtacacagacagacttgaatctattagaatttatgtatctcatcctgttaaatgctcacgtagagtctcaactcttgttgaaacccatgacattaaagaagtctaaatgttatggataatctctattaatgatggaggtttctcatatactcatgcatttcatctctctctttataatccttagaacttagctattgctttactgaaactctgctttagcctattaaatgtcatgtagccttacaaactgaagtaactgcctgtttaagcatcccgtaagtactactgcttctgatttcaactaaacttcgaaagatattccctagttttattgttttaaaatctaatcattcagctaggtatgctgtactcaataacttaatggttttatatgtttttatgtcatcctcatttcagcctttagcattcttgacttatgaaatctaattgtttttggcctttcctcatggaaacttcaacttcctcttcattatcttagtttctcttctattggctttttcaccttcattttttgtttactgacttcagcaatcagaaatatacccacacttctgagttcaggtgccatattcttttttttaaataagtaaatagatttttctagaaaattttaacctacaaattcagataccagcactttgctaactttctataatatagtccttttctttcatattgaaataaatttgggagagataaaggaaatttcagaaaacccaggaaagtaaagcctcaatacttgaggtagttatagtcaagcgaaatgaccacttaacagaatctacatagagaagttcatgggggtgctaagtcttgtttcacctttaaacattctggaggacaaattgcaaagtaaaatcattaaaatctcaaactccatgtttttttctggatgataaaatacagatttcatggaagctttaccaggttgtatgaccagacataaagatggccaatgaggctcagtgtaagcaataatgctctatggggaatattgctcaaagtgcattagaagattcttggtcttgaatattgaaccaatctaacataagggcctggttataagtaacatttataccctgaatgcatctatctaatatgttgtcttgaatgtgtgtgattcctataaactctgagtttatataattgaatgaactttagtaactcactgctcccaaaacaaacttgatctcctcccttcatgcattatatttacaagttttttttttaaccatgtataggcatcatgtataagctacagcctaaaagaaattagaaatcatttactagaggagataaataggtgcacataaattccaacggaagtcagaatatagtaaatgcataatagaggcgtacataaagagctgtatagttcaaagatagaaactctcacatagagttaggtataatttgtgaagttcttatcattaatttaaaaaaaatgaacaggatttctaaaggcagaatggagggagtagtgtttccaggcagtggaagctgcatgaataaagcttccaaggcatatttcagtgaacagcaagttgtccagtttacctgcatgttagaggattagtgcttgcatgttgagtaggagccaatcccagaagctaagatgaatttcacctaacaaatagacatgggagaaaagttttaaagttagtagtaaaacacttttgttatggatgcctggggtaaagaaatggaagagttggtaggtaattgtgtttttttagggaaatttccaagtgtgaaatcttggagggggtgtagctgttgaatgactgtgtaaataccttagagttactgtgaactcaatgccctttatgttacaaagatgttggattatgacaggtggcagcggtactagtgtcctatgttgacaatttcagtctcagggttgcatggcttcactgaggtgtacatgtgtacattttatgttttggtactgctgattttatttttagttgtgaaaatatacagaactttcttgctattgctaaaaaaaatccaagacaattactaaactaaaactctaggaagattttgggcaatcacttagattctttttgattgaacaaataagtgaacctgttcactgattcccaagacagtgatgtggacttctggtgtgtgcaccaatattttgtaaatggcctggaagtcgtcattcccattcttacaacaagaaaatgtgagacaaactgaaaattaacaacttttcttggacctatcagagaactgagatcacagggaaaaatggtcacaacaaaatctggagcgaaaggcaaatccagggtcctggccaatatctgcttacctggagcagaagccacataaactgtattccagtttcacaatgacttgtagctgagagggctgcaggactgagagtctctctgaggaattgtacttacggaaggcttaaatcaacaaaagacataaaaataaggacactagaaaaattggaagcctctggcacctacagctatagcaaatattaagcccagctaaattcctaaacagattaatataaaacctcacactaaaggcctatttcccttagttcctattatctgatacattatatccagctttcaagaaaatactctaagccatgcaaaaaaccaaaaaaaaaaaaaaaaacaaaaaaaacacacaatccgaagagacaaagcaggtatctgaatcagactcagatgtgacacagatgtgggtattatcacacaaagatagtcaggctttgccaccgtttggcattgttcagtattccttgaaaaatttaccatgccgtgaatcctgtctcatgtctgaggcatgaataattacaaaataagattcccttaaaagtcacaagtatccgaactgtgatatacgtgtagaaaaaccacagaaagtaaattcagaagtgtagataaattgcacacctgtttctctatagaacagttatctaaagaaaaagccaaaaatctcctaggataagctacacctatattctatagtatagaatcccattctggggtttgctgtcttcagcttttctcttgaatgttagaggatgagagggaaggggggaaaagggtacagaggagatacggaaggaatggatgcatttggcatggtgtaaagctagctatgtcattactttcaatggtttagaagcttgaaacaaatacaattatacagaaggtttatatttaatatagtttcctttggaaatctctagttttgcagctaagatttgccttactacccagttgtttttcgttcactctgatttgtggctgagctcatgaatcatttgccttttctattataagagaaaaaaaaacccatttccagtgatttcaactctatgttggtggctccatgtgacaggctagatgataacctcagccacaggctgcaagtttgagactagagagactgatccacaaagcacaatgacaggaattcaagtgagcatgtaacagtgtttttatttccccagagatagttgtggaagacaagggaaatacactgacgttattagtgatgtatttataacagtttgtactcccaccctcacttccattgttgaactgccattgttatttccataaaaatcaccctagacagtttcaagtttatacaaatgatttatttccacacttccaaggggcaagggtgagaaatggttctttaaagcaagtatttacttgagaaaaatttcaaacaagtcctatgggggtacaggattaagaatgaaatctatgactgtttttcaaaagccttagcctaattaaataagcttttctaaacagcaagttactgttaatgttgacattgctcataacactaagtgtaacagattgaagaatgtatatttaaactggggacttatttgagccctttattataatgaccacatataaagtaataatgatcactaatcattatcactaaaatactaattatcattttattggcactgtttttgcaatcatctaaacataaagaggttggtttttattagatttcctattggatgaccacctcaacatctgttttttttttttttctatttttagtagagacatggttttgccatgttgggcaggctggtcttgaactcccaaccccaggtgatccaccttcctcggcctcccaaagtgctgggattacaggcatgagccaccgtgcctggcctcaacatcttaaaagataaatcaaattcattttagctctctgaaactttgtctttttatttttatttttattttttttagagatgagtgcaatagctatttacaggcacaatcccactaccgatcaagacgggagttttgacctgctccgtttccaacctgggctggttcacctctccttaggcaatctcctgggggctcaccatattgatgccaaacttagtgtagacacccgatgaccatagtatgttacagcgcagagctcctgggctcaagcaatcctcctgcctcagccttctgagcaactgggactatatgtgcgtaccaccacacccagctaattaatttttttttttttttttgtagagacagggtctcaatatgttgctcaggctggtctcaacctcctggcctcaagcaatcctcctgcctcagcctcccaagtagctgggactacaggtgccaaccaccgtgccctgtgctctatgaaactttctaaatagatctcaatcaaatatatatggtgaacttttaactctctcaatagcaattagaagggagtgggtaattattgtgagaaaatagttacctgcttttattcttaaaatatctaagccttaattagattacttaatggtgccttacaagtcatattcaaacaattttgccttcagagtgacctctgaagtatattcagtccaattctcccaaaagtctctgatgtgctagacaaaagtcttctaggaaggttgaagatagatttacttttgattgaactagatttccttggggatcaaataggaatttttttttcaaagaggaattttaaagctagagttaatgatgttatgggttaacgtgcatgagtttgatagtaaaataaagtcagcttcaaatctttgctctaaaaatagaatctggctttggattaacacataacctccctgagatccatgtctttatttgagcttggggagaattgcacagtgcagtgcttggtactacatttgataccatactggcacatggtaaggtgcttaatatctgatacgtctacaattctccatgttttcatatactagtggtctttaagaggctttgcaaatggatgatggacattgaggagacctgaaattcacacctgatagatggctttagtttctcagtgaaatgggagcttatcaaggctgtcgaatggagtgaagaatgagatgaaggtttagaatagctattgtactcacatgcacatgagtttgatatccttattataagaatattgatattctgtttcttttattccaactcaagacttgtagcgtcccttctctaccatttactgcaaaaaattccacagctattagttggtgagatgaaattaatacaaagggaagtcatagtagaaaatatactttcttaatggtttatgatgttctcacaaagctaaagaaaataccttgggaagtaaaacataaaagattgctgcactgctttttcttgtgttaatttattcacacatttatttggaaaacgcttacttaacatttatctgcaaatatgaagatttgtaagataatgtctacacatctcaaaaattaacaaatacttttaaattgatcactgatttttaaaatttagtttatttttaaggcacttcaggattaagaaagataagtaaacaatgagtgacaatatacagtctatgatattacagaatatgcagccacacaggtatgtcacttagatttctcttcaagagaaaatctacaacaaggagggaatttaggtgacagattccagttgcagcaaattcaggatctcttgtagcattcatttgtgctgatgctacactctttctggacagcccttgttaatgactgaacatagcagaatggatagagcttggtactgcccaatgctaagttcttctacggcagtctgagatgagggttccctgttgtctggccaagacttcgcactgcagtttgagacttgtccacctttactctatcttcttataggttttagacatgcatcacagtctgtagcctctacttgctttctcctgcaccttttgccctttgtcttccaaaaacttttaccccagtaaatctcttccacttcaactcagccttagaccttaattgacacactgagttctgtgggaacacggaaaccaaggtatctaagtccgcttggggatgaaagaaaaaaagctactgaaataatgcttgaagtcttgaaggccaaatatgaacctacctggcaggtaggcaggagacagtgttccagacaattggaccagcatgttaaaggggcagatacagagcacaggatctgtgagtaatcccacaaagcacaggattgcctcaactaaatgcccttgaaacaaaactagattttcctctttgccctgagaaacttccttaaccttcccatagttaacaggatttttcatacatttctcatcccttccaaccaaagagtgaccatataacctctcctccccaagtcctcactgtccctttgatagttctactctggatcttgatctggaactgctatacctcctgcctgatatatatcatggtttgggttgcaagccaatacctcgtgtgcatgggtcctagctgcccccaaaatgtgttgtttctcttccactgtacaacacagagacaataaaacatgcagatcctgccaagttaaactatacgtcagagttaatttctcaaacttatctatgaattttcccgggtcttcagagaaatgaccaaactcctctttatatacagccaaatcagacatagaaaagggaacatgtactctcacagtgacttcttccccatttgtcacctctctaagtggacaaaggtttccctttggaggttgataggaggctccactacaagtagtacttgctgggctgagttcctcagggagtggtgggtatagtgtgggactagatgggtaaggaataggggacaatgggtttccaatagaacattcaggtgggctgaagggagaaaggaccaacacatctgaaccttcagagctgacagaaggaggctctgctccacccaaaagtgcccctaaactggggcagtagggggttgcattaaagaatcacctagtatgtctagctctttttcttctttacctctcatcaagcatgcacacacctgctgcagggttttatcctgactgagcagcaaaaatgctcgaacatatggtatttcatcccagtttccctccagcttacaaaacaaatcaagttgaagtgcagtattaaagactgtagttccagtaggaggctctttctcttgtttttacaaataataacaaggccaaatagtattacatagaaacaccagttttctcatcttaagcccattcagtttaatctggtcccagtgttcaagaatacatcctactggtgagttctttggaattgatgccacggttcccatgaaggaggcaggtgatttttgaaagaaaagttccaaacctgcgagattgtattgccactggccaagttccactaaaaaggataagagaggtttttaaggccagctacattaatgaggggatccctgtcgaaaattgaattctcttattcacattacccaaataatataggtgagctgagccatgaatcttagataaaccacaacatggactttgacaaaaatgcttaataaggcaagggaaatgagaaggatttagatgggaatgaccagagcaagcaggttttgggcaatagcagtagggtggattggataagcaaagccagtctgcctgaatctaagaaggaaagaagtgttttttttgttgtcgttttgttttgttttttcagtttgcaaaatgaaacaaaacagcaaggagaaaagtcccccgattaccatcttagtgcttctcaatcacacctagtcagcatagtgacaacaaaacataaccacatctatctaatcttattggctgtagctgttaaatatcaaatctcaatcagcaattttagagatggagccttcaatgctttttgttcccaatgtttcacaaactaatggacagaaattgggaggggcacaggagaagaataagttcaaatacagttaagtaaagtctcctgaaaatgacagtgaaacagagacagcaaccaagaaattgattggtgcagcaaagagaacaaggctgatgaatacgaacagcatagcccgtggtgtcaaacccgttcttagccaaaagggactttactgagaggggcttctaatcccctaaattttagaagtgattctaacctctcaagttgggcctctaacccaaggtctgtcaagtgtccgtgccttttattgagaggaggctttaaccctcttagtctttaggagagactgtaactcccctaaattgggcctctaacccaatcccattctttactcaagtatgcaccccacttacccaaagtcgtccaatcagtgctgcagtctatttcctttgggttcggggtctcttcagtatcatccatttggtggtttgccagaaatatgttaccggacaaccctacttacccaaaattagcctttgggtcgggggtttccccactgcaatcccttcatggtcaccagaaatgttgcagggaagaggtcccgatccagatcccaagagagggctcttggatctcatgcaagaaagaatttagggagcgcaaagtaaaagcaagtttattaagaaagtaaagtggtgaaagaacagctactccatagacaagaggaggacgttcccgaaagtaggagaaggaatgcatccaccctggctacagtgcttatatatgtgggggagatgtgctctgctacaagggtttgtgataaaggattaagtttcttcattactatattttgcaaaaaaatcagtgttattatctttaaagcaaaattaggaatgcttctgttctccagatattgggatatgtggacactcctaagtctgagtctgtttaataaacattattagtttgttcccttaactgcaaacatctggaggccaggaatgcctaactttctaagaatgcagctcagcaagtcccagcctcattttcctagccctcattcaaaatggagttgctctggtttgaatgcctctgacatatatatagaaagctaatttaacccaagaaaaattaaagtactacaatatttagggtttttaaagtaaaaaatactgtggctgaagaaaaaatttaatgggaacagagaccctctattagataatgtgaatatgtttttaagtagaaatcaattttaccctgaatctcatgatgccctggacctaagatgttgtttatcctatcaaggggcccttgtattgctctgtagattgatattgtataccccatcacattgctgattttcatggatgtgctgtggaggccttgaccccaggcaaactgcattcctttgaggttaacacaagcagggctttatggaaagcgttgtacaagggacaatgactgcagagtaaatgctgagggagccagccagctcaccagtttctaggcagctttagtctacagtaaccaaatgcatctcaagacactggattccaaactgtgagagaaagaaagaacaaccatcttatattttccaatgtctttatcttttagttgtacatccttagaaatgctttgaaacaaccaaaaatcaaaccactaccccaaacaacacctcagaaaggtagcatttaccaaacttggtttagatttaatgccaaaaactagttttgagatgacaaagagctgtcctttcattatgaatattcaaatgaccagttcctgagtaactgacattattaagttggtccaattaaataaataccatagagttactaaggtggaagatatatattacatatgtatactgtatttgtatttttaaagattaaaatataaatatatatatatatcttttattttccatttatttgaaatcgaaaaataaaacaatcattcagggaaatgaatcagtcttaaaaggctggtagaattggaatgcatgaagagagaaggattagccacctacaaccagaatgaacatggcattttttagacgagtaaagagattgggctttctactatctgttgggttagagggtagtgaaataaatagtctggactaaacgatggaaaaccttaaaagtagagcaaatcaatttgcatacagaatacccttgaatagcatatgtgtgtttgaatggaataataaaggctagagtgactgtggtagagagatggatttggggagatgttgaatgaagtaaagggcattaggtaggagttgattgcaggaacccagggaccatataatgaatatctgaactcggatggctgtgacagggaaaataaaatggacaggacagatagaagtatcaattcatagggaaaaattagttgtttccaactgtcctttaaatttggcatcaagtaaaaaatatatggccaatctttctaacctgtagtattttttaaaacttcactttttggagaattttatatgtacataaaaacagatacaatattatgatgaaccccaatcactcaactccaacctgcaggcaatgctgccctatctatatccttatctacttcccccttcttttgatttataatttgcaattccaacattgcatcccttttttcttttgtttcttgtgttgacatttaacatgagctctactctgttaaaaaaaattttaagtacataagaccttttgttagtcataggtactatgttttacagaagatctctgaaactcatttatttcctatatctgtaaatttatacaagatttataaaaactccttatatgccccttctcccattctctggtaacaccattctattgtctacttctataccattggctattttagaagtatcttatgtgtaagaaaaatcatgcagtgtttgtccttctgtgattgacctatctcacttgggataatgtcttccagattcatccaagttgtcacaaaaggcaggattttcttttttaagaaagtatttatttatttatttatttatttatttatttatttatttatttatttttgagacagagtctcactctgtcacccaggctggagtgtagtggcacgatctcggctcactgccatcttcacctcctgggttcaagcgattctcctgcctcaacctgtagctgggactacatgcatgtgccacgacacatggctaatttttgtatttttagtagagatgggttttcaccatgttggccaggctggcctcgaactcctgacctcaggtagtccacctgcctcggcctcccaaagtgctgggattacaggtgtgagccaacatgcccagccaggattttctttttttaaggttctgttttaggtatatagcaaatttctgtatccttcatttgtaatggacatatttgttgtttccatatcttggctattgtaaacaacactgcaatgaacataaaaatgtagctatctgcctaaaatcttgattccaattcttttagatacatactcagaagtgaaattgctgaatcatatggcagttctatttttaattttttgagacacctccatactgttttctacagcaactgcaccattttacattcccacctacaatgtacagaggttccaatttctccacctcctttctaatactcattatcttttatttatttgttgtttgataatagtcattttaacagatatatgatgatatctcattgtggttttgatttgcatttccctaatgattagtgaggttgagaatcttttcatatacctgttgacatttgtatgtctttggagaaatgtctattcagttccttgcctttttaaaaattaaattgttcattttcttgctattgagtcttaggagtttcttatatactttggatagtaatcccttatcagatatatgatttgcaaatatgttcttccattctgttggttcccattttattttttaattgtttcctttgccatgcaaaagtatttagtttgatgtaatcccacttgtctattttggcttttgttgcttatgcttttggtgtcatattcaagaaatcattgccaagtcaattgtccatcatcaagaatatttttccctatgttttcttctaagagttttatggcttcatgttttacatttaagtcttaaacctgatttaaattttgtgtaccatgtaagataatggttcaatttcattcttttgcttgtaaataaccagtttttccaatactgtttattaaagagactaccctttccctattgtacattcttgacatccttgttaaatattagttaaatttaggtgtgtggaattacttttgggctctctattctgttccattggggtgtgtgtatgtgtgtgtgtatctatctatctatctatctatctatctatctatctatctatctatctatttttatgccagtaccatactgttttaatcacagtagtttttaatatattttaaaatcgagagtgtgatatctccagctttgttcttcttgttcagattgttttgtgtatttggggtcttttgtggctccaaatgaatttcaagattttttctatttctgtaaagaataccattgggattttgacagagattggatcgaatctgaagattgctttgcatagtatggacgttttaacaatattaattcttctcatccataaacctgagatgtctttccatttatttgtgtgtgctttaacttcttttatcagtgtcttacacttttcagtgaatatgttcaccctcttggttagatttattcctaactttttttttgatgttactgtaaatgggattgttttctgagtttcattttcagatgtgtcatttttagtgtacaaaaactgaactgactttttatgttaatgtagtatcttgcaaatgtactgaaattatttttgcatcccatcgctttttttgtagatactttggagctttgtacatacaagatcatgtcatccccaaacacagataattatacttcttcctttccaatttggatgctttttcttgcctaatttggagttccaaaactttacggaacataagtggcaaaagtgggcatccttgccttgtattagctttttattactgctgtaacaaattgccattaattttgtggctaaaaatagcacaaatttattattgtgcagtaggtcagaactctgacacaggtcttactgggctaaaatcaaggctgtgttcctttctggaggctataagagaatattagttgcttgcctttagcagcttctagaggccacccacattccttggctcatggcctctttctctgtcttcaaaatctacagaagtgggttgaagcctttccaagccacatcactatgacattgtcttctgcctatcttcttctactcttaaggacttaagtaattagatggggcctatccagataattcagtataatctgccttcaaaaggtccttataaagtccctttagccatgtaagaaaacatattcatagggactgaggactaggacatgggcattttggaggagcccattattctacctaccacagtatctttgtgatttgtgtgaataatctttttctggtccatatggattcagttgtaataatataatattgataaatcattgaacaataaattatgtcactgcagaataaatttgtgtgtatttgtttaaacatgagtctactgttctgtagaaattgagtcactgtctgttttcttagaactccattttaagtattatccaccagctgcactaacagaaccaaaaaagttaatgtattttggaagggaaagttcacaccatggggttttaggcttggaaggcaatgcatttatgtgatagcgttaacagactttcatttaatatattcattagaatgcaagcaggcaaatcttggtatttacaggcataaaggtcataattttgactacttttatgttattgtgaaaatcactacgatatagtaatttgtaattttacttaggcatcacagttctatgaagctgataagcaaaagcatcacttaagcttcctaatttttattttcccagtctgtcatttgggaataacaataatacctatcctagaaggcagtcataagaattaaattttataatgcttacaaggttgtcagaaaattttaaacagataataattgttgaataaatgtcagcttttatttttgtttgctagtgagtaatcctggatgaactgcctgcacgtacactttcatgtggttttgttcttgtccactcatatcctatgatatattttgtgaaggaaaccatatatatttcacagcattcacgactttgggtaattttgaaaacttcagaccagggcatagtgattaggaatatctatttgcagacagtaaaatgttggccactcaaaagaaatcacataaaaggattataaattgatttactccaaggccacgtttttgtttttgctatatgttagagtctgtgacaaattctttttaaaatgttgagtgattaatttttgcaaaaaactaaacaccatgtggaagttattccattgactagagctgggcttcctattttggaccaatgaggaagtgtgaatgtggagtaatgagactcaacccattactctatattagaatcacttgcaaagtattggaaactacaattgtatagggagttcacatgtcagagattcatattcagctatctggaaatagagaacaggcatgtagatcattaaaaacacccacaggtgattctgatggatagcctggaataagaaccatggctttagtatatttaaagcagaatcttcaggttgtaatattggcatcagtaatttcaaattttcccaggttattttatttatttatttatttatttatttatttatttatttatttattttgagacggagtctcgctgtctcccaggctggagcgcagtggtgcaatatcagctcactgcaagctccgcctcccgggttcatgccattctcctgcctcagcctccagagtagctgggactatgggcacccaccaccacacctggccaattttttgtattttttcagtagagatggggtttcaccatgttagccaggatggtctcgatctcctgaccttggaacccgcctgcctcagcctcccaaagtgctgggattacaggcgtgagccactgcccccagcccccaggttattttaatgtgcagccagcattgagaacctttgctttatattaatgagactaaacaagatctaaagaagttctgctaacattttgaggaatgactcagcctcaggtggctgatgttaaggaagaaattaatgtaaatgtgaaggcttatgttcaagtgtatttactaagatatcaccatcttcttacttcattctatctgatctgagcaccttgagtggaatgtggtatggaatatgtatttacaagatggttgtctgttgcctgcaatggaaggacaatatccacaatggcatggtggtgttgttgggagagaagggattgtggagatgacaaggaggggtgaatgatctctcataagtgtacttgaattattgagagattataggcgattaaaatagaacattaatattacattttctcctatactcaaatatcttttatgcaatccttcatcattacttgaacctctgcagacttaaatgtccctgtctgacagctttgaagagagtagtggttctcccagcacggagtttgaggtctgagaatggacagactgcctcctcaagcgggtccctgacccccgagtaacctaatggggaggcacccctcagtaggggcagaatgacacctcacatggccaggttcccctctgagacgaagcttccagaggaacgatcaggcagcaacatttgctgttcagcaatattcgctgttctgcagccaccactgctgatacccaggcaaacagggtcgggagtggacttccagcaaactccaacagacctgcagctgagggtcctgactgttagaaggaagactaacaaacagaaaggacatccacaccaaaaccccatctgtacgtcaccatcatcaaagaccaaaggtagataaaaccacaaagatgagggagaaacagaacagaaaagctgaaaattctaaaaattagaatgcctctcaccctctaaaggaactcagctcttcgccagcaatggaacaaagctggatggagaataactttgacgaattgagagaaggcttcagatgatcaaacttctccgagctaaaggaggaagttcgaacccatcatacagaagctaaaaaccttgaaaaaagattagacaaatggctaactagaataaccagtgtagagaagtccttaaatgacatgatggcacaaaaaaccatggcacaagaactacgtgatgaatgcacaagcttcagtagctgattccatcaactggaagaaagggtatcagtgattgaagatcaaatgaatgaaatgaagtgagaagataagtttagagaaaaaagagtaaaaagaaatgaacaaagcctccaagaaatatgggactgtgtgaaaagaccaaatttacatctgattggtgtacctgaaagtgatggggagaaaggaaccaagttggaaaacactctgcagaatattatccaggagaacttccccaacctagcaaggcaggccaacattcaaattcaggaaatacgagaatgccacaaagatactcctcgagaagagcaactccaagacacataattatcagattcaccaaagttgaaatgaaggaaaaaatgttaagggcagccagagagaaaggtcgggttacccacaaaggaaagcccatcagactaacagcagatgtctcggcagaaactctataagccagaagagagtgggggccaatattcaacattattaaagaaaagaattttcaaccccagaatttcatatccagccaaactaagcttcataagtgaaggagaaataaaatcctttacagacaagcaaattcggagagattttgtcacaccaggcctgccctacaagagttcctgaaggaagcactgaacatggaaaggaacagccagcaccagccactgcaaaaacatgccaaattgtaaagaccatcgatgctaggaagaaactgcatcaactaatgagcaaaataaccagttatcatcataattggcaggatcaaattcgcacataacaatattaaccttaaatgtaaatgggctaaattctccagttaaaagacacagactggcaaattcaataaagagtcaagaaccatcagtgtgctgtattcaggagacccatctcacgtgcagagacacacataggctcaaaataaagggatggaggaaaatctaccaagcaaatggaaaaaaaaaaaaaaaaaagcaggagttgcaatcctagtctctgataaaacagactttaaaccaacaaagatcaaaagagacaaagaaggccattacataatggtaaagggatcaattcaacaagaagagttaactgtcctaaatatatatgcacccagtacaggagcacccagatacataaagcaagtccttagagactagaaagagacttagactcccacacaataataatgggagactttaacaccccactgtcaacattagacagatcaacaagacagaaagttaacaaggatacccaggaattgaactcagctctgcaccaagcagacctaatagacatctacagaactctccaccccaaatcaagagaatatactctcttctcagcaccacgtcgcacttattccaaacttattaggtctgcaccaagcagacctaatagacatctacagaactctccaccccaaatcaacagaatatactttcttctcagcaccacgtcgcacatagttggaagtaaagcactcctcggcaaatgtaaaagaacagaaataagaaccaacagtctctcagactacagtgcaatcaaactagaactcaggattaagaaactcactcaaaaccactcaactacatggaaactgaacaacccactcctgaatgactactgggtacataacgaaatgaaggcagaaataaagatgctctttgaaaccaatgagaacaaagacacaacataccagaatctctgggacatatttaaagcagtgtgtagagggaaatttatagcactaaatgcccacaggagaaagcaggaaagatctaaaattgacaccctaacatcacaattaaaagaactagagaaacaagagcaaacacattcaaaagctagcagaaggcaagaaataacaagatcagtgcagaactgaaggagatagagacatgaaaaacccttcaaaaaatcaatgaatccaggagctggttttttgaaaaggtcaacaaaattgaaagactgctatcaagactaataaagaagacaagagagaagaatcaaatagatgcaataaaaaatgataaaggggatatcaccaccaatcccacagaaatacaaactaccatcagagaatactataaacacctctacgcaaataaactagaaaatctagaagaaatggataaattcctggacacgtacaccctcctaagactaaaccaggaagaagttaaatccctgaatagaccaataacaggctctgaaattgaggcaataattaatagcctaccaaccaaaaaacgtccaggaccaaatggattcacagccgaattctaccagaggtacaaggaggagctggtaccattccttctgaaaatattccaatcaatagaaaaagacggaatcccccctaactcattttataaggccagcatcatcctgataccaaagcctggcagagacacaacaaaaaaaagagtattgtagaccaatatccctgatgaactttgatgcaaaaatcctcaataaaatactggcaaagcgaatccagcagcacatgaaaaaccttattgaccatgatcaagtgggcttcatcctgctggttcaacacacacaaatcaataaatgtaatccagcatataaacagaaccaaagacaaaaaccacatgattatcacaatagatgcagaaaaggcctttgacaaaattcaacagcccttcatgctaaaaactctcaacaaattaggtattgatgggacatatctcaaaatcataagagctatttatgacaaactcacagccagtatcatactgaatgggcaaaaaactggaagcattccgtttgaaaactggcacaagaaagggatgccctctctcaccactcctattcaacatagtgttggaagttctggccagggcaatcaggcaggagaaagaaataaagggtattcaattaagaaaagaggaagtcaaattgtccctgtttgcagatgacatgattgtatatttagaaaaccccattgtctcaacccaaaatctccttaagctgataaacaacttcagcaaagtctcaggatacaaaatcaatgtgcaaaaatcacaagcattcttatacaccaataacagacaaacagagccaaatcatgagtgaactcccattcacaattgcttcaaggagaataaaatacctaggaatccaacttacaagggatgtgaaggacctcttcaaggagaactacaaaccactgctcaacgaaataaaagaggacacaaacaaatggaagaacattccatgctcatggataagaataatcaatatcgtgaaaatgtccatactgcccaagtaatttatagagtcaatgccatccccatcaacctaccaatgactttcttcacagaattggaaaaaactactttaaagttcatatggaaccaaaaaagagctcacattgccaagtcagtcctaagccaaaagaacaaagctggaggcattatgctacctgacttcaaagtatactacaaggctacagtaaccaaaacagcatggtactggtaccaaaacagagatatagaccagtggaacagaacagagccctcagaaataataccatatatctacaacaatctgatctttgataaacctgagaaaaacaagcaatggggaaaggattccctatttaataaatggtgctgggaaaactggctagccatatgtagaaagctgaaactggatcccttccttacaccttatacaaaaattaattcaagatggattaaagacttaaatgttagacctaaaaccataaaaaccctagaagaaatcctaggcaataccattcaggacggaggcatgggcaaggatttcatgtctaaaacaccaaaagcaatggcaacaaaagccaaagttgacaaatgggatctaattaaactaaagagcttctgcacagcaaaagaaactaccatcagagtaaacaggcaacctacagaatgggagaaaatttttgcaacctactcatctgacaaagggctaatatccagaatccacaatgaactcaaacaaatttacaagaaaaaaacaaacaaccccatcaaaaactgggtgaaggatatgaacagacacttctcagaagaagacatttatgcagccaacagacacatgaaaaaatgtgcctcatcactggccatcagagaaatgcaaatcaaaaccacaatgagataccatctcacaccagttacaatggcaatcattaaaaagtcaggaaacaacaggtgctggagaggatgtggagaaataggaacacttttacattgttggtggggctgtaaactagttcaaccattgtggaagacagtgtggccactcctcaaggatctagaactagaaataccatttgatccagccatcccattactgggtatatacccaaaggattataaatcatgctgctataaagacacatgctataaagacacatatgtttattgtggtactattcagaatatcaaacacttggaaccaacccaaatgtccatcaatgatagactggattgagaaaatgtggcacatatacaccatggaatattatgcagccataaaaaacgataagttcatgtcctttgttgagacatggatgaagctggaaaccatcatactcagcaaactatcacaaggacaaaaaaccaaacaccgcatgttctcactcataggtgggaattgaataatgagaacactcggacacaggaaggggaacatcacacaccggggcctgtcatggggtgcggagaagaaggagggatagcattaggagatatacctaatgtaaatgaagagttaatgggtgtagcacaccaacacggcacatgtatacatatgtaacaaacttgcacgttgtgcacatgtaccctagaacttaaagtataataaaagagaagaataaagtagaaaactatataaaaaaaaaaagtcagcagatttgctaatcctctctgcctggggatttcctaaatttttggctcctgcatttgctctcatgaatagtagaagagaaaggactaacatttgtgaggaaaaataagcattgagaggaaaaggagcacttgatgagagatggatccaaatcattaccatatacataagtaagtaccattagttatgtaagcatcatttatactggtcaaatattcttatcatttctttcctcctgtcttagccctcttctgataatctggtaaaagctatgaacctgtcctagaaatgcacgtgttcacatttacagaaaggtttgcatatatatatttttaaagtcctcattgaattatcaatagacaactcagtattacacaaacccaaatcattgcctacttctcattcttactccactattagctgtagctgtgcaacatatcaagagtcaagaaaattttgatgttacattttgtgagagctaagtattagggataagtgtgaacattagattaaaaaactattttcatgcttcatttgaatcaattattacttgagaagtttaagaaatgcccaagaattctgccattttggtataggcagagtgatcaaatcttagaacaagaagagaaaacagtaaagtgtggagagcagaaagatatgggaattattgaagaatgggatgaaggattagtaaatgtaattctgttattgttcaaaactctgagattctctgataattttaattggtcttggaggttccagaaacttaagtaacaatcagaagagcaaagaggaattaaagttttccttcccaaacatcttatgtttcttcagatccttttgtaaaatgcaagagcaataaggagtggtcagattattgattccatgtgttgaaaatactgggcctgaaatcagtacacaagtaaagaaaatgctagaaggggaaataggaagctctagatattgaaaaggggttcttaaaatgtaagtaaggcagcctatagtagagaaagtaatgggtttcttaattataatttttattttatttacttatttatatattttgttgtttagagacagagtctggctctgtcacccaggctggagtgcagtgttgtgatcacagctcactgcagcctcaaccttttggtctcaagcaatccttccacctcagcccctcaggtagctaagactgcaggtgtgtgtcaccatgcccagttaattttgattttgatttttttattttttgaagagatagagtcttgctatgttccccaggttggtcttgaattcatgggctcaagtgctcctcataccttggcctcccaaagtgctgggattacaggggtgagccacagcacccagccccagttagaattatctttctaagactcagtaataatccacccttcaggaagcaagggtcatacacttttccacaggaattccttggcttactcatttgggtggtgttgaagtggtactcctcacctgtgcccccacaaaagcattctatttcttcttatatgtggcacacaaactatactgtcctaacaacaaatacatgtcttcctcccccactacttctttgtattccctcctactgtctgtctacaatagtttttaacacacaataaatcctaaataaatgtgtctgttgaataaatttgaattgatcagaatttgactttaatgacaaaacatgcttaattcttacaggcatttctcaaaatgatgttcagaatgcacaaaataattaaactcttaagctatgaaataccaattttaaataaaaacgtgggagaaatatcccacggatgtccttttggatgctttttcacagtctcctaaaaataaaatttggaacttcttttgcgcagttactctttcaacatagataagcagagatctggatggggtttttgcagaagtaaaaatttttttatctcttatatttatgatttcttctgagactgactatgtgaaatgatgacatttgtgcagtttattagcagtcagctacaaatgtattggagtagtgttatgtaacactaaatagtttgaatccctaaagggacagcaaatatttttttcggctgacatgtcttattagtcaaaacccttaggaaatcctctaaataacccattcactaaaaaccatggcttaaaaatcctagtttaattgtttccaaagaagtactgaaagttttaacatataaaatacaaagtaacctaagtggaaatcaatcatcatgacatttgctaaagtccctattaattaagagaagactgaataataatatttctttttcaggatctgttaatataattttggagtttgacacacaagcaaaaatacatacactaagaggaaaaagaaatgtggaagatactgtaggttgatttgttcaaccctacatccccaacctttttttgtcttctttaatctcttctatagaggctaaataaacatcttttgcagccaggagtgccacatgactcaatgttggccaatgagatgtgagccaaaccctacagcgaactttctctagcaccatcatccttctttctttaaaccctgaatttcccgaagaagtatttgtcttataatagtgaataaaaggccaagagaatcacacagatagcagcctgtttattttgagcaactacattattgtctacagtcaattaccactagacttcttgtctcaatagtatttccttattgcaaagccactgcaaattgtgttctctgtttcttaaagggtaactcactcttaactgatgcatctatttcaatagtgcaacctacattggtagagaattatggttacaatataatggataatgttctgtttttaaaatgtgtattttaaattatcttctaaaaggctagttttttagtattatcagttgacacactttgttttgctgtcctcactcaggtttccattatgccttgatatttactcctcctaagagctatgtagatgttcatttgatactgcagtctgaaccacgtcttcctttaagtgagctactatgccttaaggcatcctgcatctctgccttgcctctgatgcttcttctcagccttgcttgggtcttctccttgagattctccaacaacaaaggcatccaaatgcattgttcatataaatgtgaactgaaaagactgtgtgccatgaacagtttaagtttattccctaagttcatgaattatgactgaactctgacaaaagatttccttatcagtaatattacaccatatgaaatcaattttttatcaatgaaaatcatgaaatataaatagaattttctcccatatatttacatactataatgcatttttttttaatgtgaagattagttcataggttagaaaccaatgtttgacaactctgttatcttaagcaacattgagaatatttgctccttggttgtagaggaagagatgctattttctctggaattagaatccttttatattaagtaaataataacaacagttcactttaattatatgtttacttcataaagtaagcatatgatctcattcaatatttaaaaatattgtgaagtagattctcttttctaggccctagtgcttacataaaataaaaatttagcaaatgtctgttgaatggataaatgaatgcatgaatctttgagctcattttttttcaactatgaattggaagaaatactaagttgaacaagacagacacgttttctgccttcatatatatttgagttgatgagtgagtaaataaacatgaaaataaaaataattataagttttattaagtgctatgaaggaaacaaagagagcatgtgctacggatgaggggtaggtaacaacatgttcttaaataaggcaattagctgaggactttagtcacagagtcagctgatcattggtgatttcaaatcatactcacgtcttctgcctcctgagctggttctgtgtcaactactttattctgatacacaggcaaaattgtgtactgctccttaaaaataagttaggccgtttgagaaataacatcaatttttttcaggtctcagattgttcttgaagttggacaaatattcaggagtaatgagagactaactttcgtcacccttccacaatttaggagatacttagagttacttcagcgtttggtattgtaaaatgacatccattggtcttaaagtaggagagttttaaaacagttttctaagaagcactgaaaaatggcttcttaaaaagcactgagtttcgtttaagccttgtggcaccagagttcctattagttatatagcaataacataattggatattttgtgtcattgcctctattttttaaacattaaattttattaagcatttttcataaacagtaatattttcaggtgagaatacaaaataaattgttcattttaaaagttaattctgtaaccaggtctatggttgaactgtaaagttagaaattaatttacacactcaggattgctgtttgcaaagaccatttgttttttccaatagagtaaggaaagcagctgagcaaaatggaattccagtttttctaaagggctgttataacgacaggagtgtggtacaattatgtctatttacttgtcctgacactgggttatctccctcgtgaccctgcagagcctgaggtaatgcattctgcatggtagtttgggtctgagaaagttctaagaacttagtgacaattatgcattgtgcttcattatttatcacactggggtaacgtgaatctctctgatgtccactacaggctgatccgaggcccctgttcacaaggaaagtcatgaggaacccttatcctactttcaaaacattacccgcctgcaccattttcattttattcagtagggataatgtgcttatgactgggaacagccattctgtattctagcttgactctcctttaaactagtagttgtgctgtacatgacataccttgtgttactagaaattaggatatttgctctggaaaattttaacaacttcaaagtgtaaatgagcagccagaaatgtttctacgaggtcagctgcattccaccaacaccagaagcctgcatgtatctgattttgtaaataaacaagagacatgatgtttgaaaaaacttggttttccttgacctgtgcaaaattggttggaatgtttctttaacattcccacttgcctttcaagctgcagattaatgtaaaattccaagattttttaggaaccagtgtctgcattttctacttgatgaagaagctttggaaagaacaattgcttcatttaaaacttttctaaaatcaatactgaacaaaattgtatttatacccatacttattcagcttgggtattttcaacttagagagcttaaattctagacccagtataacataagaaatgtcaaatgtaagaaacaaagattctagaatattccagacccctggtggtattttctgagtcaaagggaagctatagaacgtgtagcaggacgagccacagacaaaactcctcagacaccgagttaaagaaggaagaggtttattcggctgggagaatcggcaagactcctgtctcaagagccaagctctctgagtgagcaattcctgtccctttttaggatagtttgtaactgtgtgatttggttgagcatgtgaatgggggtctggtatccttatgagccgtcttgtgcataagtagcaggcctataatattgtataattctctcagggggctatttattatcttttttattattattattattttggctaacactttacttgtgttgtttatgagccctcaccagtcttcagttcttaattttattttaaaaaccgtggtcatgggaggctcagatgggtcataacacacatcagattggtcatttcctgggctacataccttatatagaataaaattatacaaacaagttttttttagggttccagtacacttataataactataaaataataaggccttagcaactttttgtcctacctcagtgacttgatgtatacactgggaacagccctcagtctgaggaaggtcagttgaagtccttactgcacaagtccaaattttaaggaaaatgagtcttgtgatgagtttcttcatgctttggctgtgtgtggaccagtcagcttccaagtgtgactggagcagggcttgttgtcttcttcagagtcactttgcaggggctgacaaagctgctcccatccacgtataactctcagtctactgatgtttaaggttggtctcagaggttgggcccactagaataaactgagtccaatacctctacacagttatgtttaactggactctctgataccagaagcaaggtggcggggtttagggtgttgtaaacttcaatggtgatgttgggattttcacagagcaagctttggttatctagttagtctagcatttgttaactaatgatgtccttcggtatttattaaagtcaccacagcatgggaggactttatgtttaggttttgcccaagagttactttatctgcttcttgtgctaacagggccattgctgccagggcccttagacatgggggccagcctttggaaactccatctagttgttttgagagataggccactggccttggccaaggccccacagactggattaaaactccaactgccattttttttttctttctgacacatagggtgtaaagggttttgtcaggtcaggtagctccagggctggggccaacatgagttttttttttttttttttaactcatggaaagcttgctgctgttgattgtaataggtgtagtttatctaatctacatttttattaactgtcacccactaaaatattgacttaaatcctatagctatttgatttcaagctttaaattgatctggtattccttgcaggactccaattgcatctaaatagatgtgagagttgaaagatccatagggacttctctcactttacgatgtcttattttttctccttcttgttgatgaaatgccccagtgaaagggatagccaaatggactaaagcccaagtgtcactctagttattcggcagagtgcccagtaaagatccaccacaataccaccacacatctgcttggggatgaacaagggctgactgattgataagctcttgaaaattcttaagctcatcgcatcccttcaggtctccaagggatgctaagttgcctccctgtcgtgagagacatgaagtgaacttaatgttgggaagcggaagctggatggcccttgggggctgacccacagggtgccagactttgggatatagcagagagagcttggcatgacttattacttcaggctgtagaatactggaaaagagctaccatgcagcctacgcctggtcaactggaggaccaccttaatagaaaggggaaaatctgggcctctggcctgccatgtgcacaagcataacaattgcttttgtttaacgtgcaggcggaatatttgatccattttaaccaggcatttgcatcttggtatcctgtcttaattgctaaagtttgttttaagtctttaacttctatgatcctctagtaaaatgaatgtatgattttaggaaattataaaaaccagtcggggcagttcatccttgctctttagtggtccacagaatgttggaccaactatggcataaaagctctatgttggggggcaagactcctggttggcactggggtctttatcgaaatctcccccgattaaacggtcctagtttaccaatgcccagtctaaagagagtcaagagggatagaagtacttttctgaagtagaaagctgtctttgacttggcaagtctccacagggtataacaaggcaagcattaaatgcaacagtttgaggtgaaattgacttggttatgttaataactagatggtccgcaatagaatgaggaaagaagaaagagtaatagaatagatgaaaagagttaaatttttcttagctttagcttggtagggttttcccctgggactatggcccacgactctggagggggtggcgctttcttgactcaggtgtgatgagtccatccttttttgctgtatgaacagcagccttggtggttagcagcacaaagtagggtccttcccaggctggctcgagtttttcttctttccaccttttgatgagaacgtgatcttcaggctggtgctggtttactggaaattctaggggtggtatgcatactaaaagacttttaagtggaagataagccaagtatataatttttaagaaattgaccatttgttttaaatgtggggaccttggcagtggactttatagtccttagtgccttgttactgagaaatttcctttagcacctatttttattagtttttaaatcaaagaaagccaaataccattacatttaacaatgcttcctgtatgatttttataccagataagttaaattttacctttatattaatgtgttattaatgttaaacctaattttaataaaaccttgcagacatatttatctaatttttaatatttgactataaggtaagattttatagactctttttaacattttataatttttgctaaagagcaggttggtacttcaagaaaaacctgttatgcttttattttaatgtccagtttacagaaaaactggatgatacctctttaactttagccgatgtttacacacagattttttttttcaattaacattttaaaacttgattaaacctttaaaacaaaacgcacatatttttaaccttttaatgtaggtaaaactttacattcttatgcctccttataattcttctattaaaagtatattttactttttttatataccttgcacataaactgtttctttaatagttttacatttaggaggcctaattacttttaaactagacaacatttcttgcatgaatttccttttataaccttttttttcatgactttcgcaggcagttcttcaacatgcttcaactttctgacttattacaaatatttctttctttaaacaaccagctaatttatttcaggacaagaatttaccatataatactctttttacataaattctgcccccccttttttcctttttttttttttgaagatgataaccatttttttccaaagcaaacttcttttgtgtctgtggactagactgtctaaggccgcaagaatagaagttagtataaaacatgttacactgttaacttttagcaaactttacttttgttgaaaaccttgcaagtttgggattttaattatcttttgctattaataagaccttgttttgtccaaattaacttagaattggtatagatggctttttttttcctaacagaatagccccttgctttaatatttttgagttagtaagctacttttttgcttttttgatttaggatatttctgaactgaactagtgaggtgtgctcacaatgaggtttcctctaaaagttattattattattttactttttttctgttagcaaagtagttgctgctacagattgaatgcatttgggccatccacgggctactgggttaaggatttttgataggaaggcctcagtgcttttgggatacgcccttgtttacactgacaacaaagtagtattggagtgttacaggattatggagaataccttcaattatcaattataggtttcaaatttaccttggcttttaaaggaatagggtacactttttttcttaactacttgtatatctctgtctttctcttctctgtctctctctctcctctctgcctctctctctctctctctctgcctctgccagccacttatgctgcaattctctcaaccactgtgaagggatctaaaaccagcagtaaccaagcatctatgtacgggaactggtctgggtgccctggctttacaggttaccttgtgccatacctttgaaacaagggacctttccaggcttccttctgatggccaacctacctctaatgctggccagtctattttacataaagttctaagttttcctggtgtcatagtctcccttaaatccctttttgaaatttttcaacatagttcctagtagggtgggcttatttgtgcctgacccatgcttctttgaggcaaaacaccacgctcacaccacatgcacaccacaaaacaaagaaccggtaaaaagggcacacacacacttttacagtttacaccaaacaaaaatcaaaaccaaaatcagagtatccagaaattcaagccaagtcaaagacaaaaccaaagtatcaagcaatccaagtcaaatcaaaaacagaaaccaaagtgccggtacaggcacaccatcggtgatcaggccatgcttccactcaaatggagtaggcaagttcccaagaccagtcctgtcaagcaattcaaaccaagtcaaaaccaaaaccaaaaccaaagtgccaataaaggcacaccgtgggtgagcaagccacgcttctactcaaatggagtgggcaagttccaaagactagtcttaccaagtttcagatgtccagactccaagtaccagttccttcccagtgttcagccactgtgttgatcctccacgggggcctgccacacactgctctggcaaggcgtcccaccggggcaaatgcctacctgggagtgctctcaggatccacgttgctcgggctggccagagtcccccaccggaatgttccacagggcaggcttaagtcacctaaggagctgcctcgaccatccaccaatcacctcacttcccagtcagggaaccaggaaatgtagcaggacaagctgcagacaaaattcctcggataccgaattaaagaaagaagaggtttattcggccagaagcatcggcaagactcctgtctcaagagctgagctctctgagtgagcaattcctatcccttttaagggctcacagctctaagggggtctgcgtgaaagggttgtgattgattgagcaagcagcaggtacataactgggggctgcatgcactggtaatcagatcagaacagaacaggacaggaattttcacagtgcttttccatacaatgtctggaatctatagataacataaccggttaggtcaggggtcgatctttaactaccagacccagggtgtggcaccagactgtctgccagtggatttcatttctgccttttagtttttacttattctttcttcagaggcagaaattgggcataagacaatatgaggggtggtatcctcccttaaatggactccaataaatgtaagtcagctgtgggtgtatggattgctctccattagcagggagcagcttaggttgatgcagcagaaaggtggcagagtcttaggtttgagttaggcaagatagatgaggaaaaggcagacagtgaactgctaagatggaatgttcgtgccttatccgagaaatgtccaagtctgcataaccaggagagacagaggatgttctgagatgtctccctgcactcttgctatgtctatagtcaattctccacaccctagccagcaagaccaaatgcaagtctaagtcaattcaagtcattcccctgcttaagactttccaatgtctcccagtagctgaataaagttcatatatatttccaaatataatttggaagataaacaccaaatacatttctaactcattgccattgcctacaaggccctaaatgatccattctggtaagctctccaacttcctttcttaccctgcccccactcatgtccacctataccagcctctttgcagatcctgaaacatgccatgctgaaccttttctcagggacttcttcttgctgaacttcttcccccattcccacctctcccagactgaaatgatctatcctagttgtctgcctgtattgatctctcactttattagggtcctcacttccttctcaagtcttctccttggagaagtcttccctagtacactctctaaaatagtttctccacccgtcatgaggccaaattatttgtttacagtaatatcactttccccctcagctttattgaggtacagctagtatccaaaaagctgcatgtaattaatgttcacagtttggtgggtttggacaagtgtatacatacactcacgttatcattactacaagccaggtaataaacatatccattacctccaaattttccttgtgtcccattgttttgtttttatggtaacaacgcttcacatgagatctactctctttaagtttttaagttcacaaaatcttattgttaactatagtcactgggttgttcagcagatttctggaactcactcatgttgtataactgtaaatttatacacattgaacaacaacttcctatttccccctcccaccaatcccttggtaactatcattctattgtctacttcagtacctttgattattttaggtatctcttacgtataagaggaatatgcagtatttgtccttctgtgacttatcccacttaccataacgtattacagatccacccatgttatcataaatggtaagatctccttcattttattttatttttaaatttaattttattttttgagatggagtttcactcttgtcacccaggctggagtgcaatggcatgatctcagctcactgcaacctccggctcccaggttcaagtgattctcctgcctcagcctcccaaatagctgggattacaggcacccaccatcacgcctggctaatttttgtatttttagtggagatggagtttcaccatgttggtcaggctggtctcgaactcctgaccttaggtcatctgcccgcctcagactcccaaagggatctccttctttttaagggctaaatgatattctattatatatatatatatatatatatatatacacgtgtatatatatatatatatatacacgtgtatatatatatatacacgtgtatatatatatatatacataaaatacacacatatatatatacatatatatatatatatatatatatatatatatatatatatatatgtgccatcttttctttacccattcatctgtgatggacatttgggttgtttccatatcttggttattgtgaataatgctgcagtgaatatgacagtgcagatatgtcttcaagatcctgatttcagttgatacacacacacacacacacacacacacacacacatatctctatctatctatctatctatctatctatctatctatctatctatctttatctccagaagttggactgctgtatcatatggtaattctatttttagttttttgagaaactgccatactgttttccatagcagcagtacaattttacatcctattaacagtatatgaggattctaatttctccacaacctcaccaacacttgttatcttttgttttctggacaatagccattctaaccaatgtgagttgatacctgtttgtggtttcaatttgcatttccctggtgattaatgatattgagcatgtttttatattatctgttggcatttgtatgtccttttgggggacatgtctacttgattccttttccaatgttctaaccaaattacttattttttgctctcgagttgcagaaatcctttatatagtttggatattaaccctttatcagatatatggtttgcaaatatcttttcccattccatagtttgccttttcactctgttgattattttctttgctgtgcagaagttttaaaaaatttgttatagtctcactactatttttgctattgttgcctgttcttttggtgtcctatcaaagaaacaatttttgtcaaaacccatgttgagacattttttccttacattttcttctaggtgttgtatggtgccaaattttacatcaaatctttaatcaattttggttaatttttgtgtttggtaaaagataagcatcccatttcattcttctgcagatggatatccagttttgccaaccctatttattgaaagactaccccttcccccttgtattcttggcactctgtagaaaatcagttgaccatacatatgtgggcttatttctggggtctctattttgtttcactgttctatgcttttatgcccgtgccatactgttttggttacagtagctttgtaatacatattgaagtcaggaagtgcaatgcctccagctttgttctttttgctcaagatttctttggatgtttggggtctttcggagttccatatgaattttagagctttttttttctacttctgtaataaacatctttgagattttgacaggggtttcattgaatctatagattattttgagtcatatggatgttttaacaatattgattcatccaatctatgaacacaggatgtctttctatttatttgtgcctactttaacttctttaatcaatgttttatagttttcagtgtacaaatctttcacctccatggttagatgtattccaaagtattttactatgtttgatgatattgcaaatgggattgtcttaatttccttttcatataggtcattgttgatagttacattactttttggtattgtgttgtgtatttattagtgcaacttcttattagttgtcttgttaatatctgtagcccagcacctaaaacaatgcctggtacatgataggctcttgataaatagttgatgattcattaagaaaattaatacctgctgatttataaggggaagaaatatggtaatttaatccatgacctttatagcaaagaaagtcatgaaaaatgagataggtaatgaggtttaagtacaggaaaagtggttcaagaggctgaattttggaactgtgagttgaaatgtattttagaatgagttagaagtaaaagacctgtagattagagtccttgattgtcaagagtaaagggatcacattcaaggcttgataaggattggtccagctacattttttttcttgaaacattgaaatttatttttttccatatgaaaatccattattttctgtgcatcctgaggcacaaataaaaaggtgtatcttttataattttgttgaaatttgaaaatactatctttggggttttctaatttcttgcgcaattgtttttccaaaagttaagtgggaaaaagggatttaaggagggagggagagagaaaaggagggagggagagaaggagagatggattttgcttttcttctttgatcagcagaaaaaaatgtgactgctagcaacagcttttggagaggggaacaggaatctagatgtgcagaagccaggagggcatatgtggaaataaatatctttcctgcgagtgtggcagagaggtgggtatgattgttgtccaaaaaatactagtaagcaagtggcagagaagctgataaactgactcagcacactctgaggtttggaattgttcttttagagaactgataacgggaggtgttataatagcagagaaggggaaaaaatgacctatgtatatattttttactctccaaggattttggttatgtttctttctttaatcatatttatttcatagtaaaataaagttattttatcataagataatgtagacctagaaatggatgtaaatgccaattagaactgttgataaggaatgaaaatatattaaaggctttgacatgaacactttttaggtttaattatttttaaattagtaaatagagaatccgtggacatgagggcccttcctctggcttgtgccacacttcagaaacatgtctcagttgatttcatcatgtggaaaaaaatgggttagattaaaaaaaaattaggtgaaagagtaaatagttgggagatttaaatgaaaaattatgagttgaaagtaagaagtgaaaatccatgtactgcgtcttgccataattagaatctgggtgcgtttgatgaactgaagattaaatagtttctgggaacttttaaagccaggggcttttccatattcccagcatgactcagcatgggaaacttccactcagtgtaagcatgcagggcattttgtgagcagaaaagccctgccagcttctaagcttcatgggagaaaacaataaatatggaagccaccagctctctgaattaaagagaacaaaaaatgttctgaaaagaaaaggaaggggtagctcagtaaagagaaccttattactgggagctatttagtcatggcaaaagttctagatctttaagacaagagttgttggtatcgattatgtgaaagaattagatacagatatctaaaactatctgatataattggaatataaaaccatttaaacaatataatgagaggacaagagatttggagcctcaaagcctgggtttgagtcccagatctatcacttgcttgttgttattgaagtataatatacacacaaaaagctgcataagtgatggtgctgtggcttttcacaaaagacacatatgcatgtaaccagcattcactgaaattgaggatcaggatattagcaacatctcagaaagccccttttcactccctttttgttactgacccccaagggtaaccagtctcctgattcctgatttctaacacagcagattcattttgactgattcatcataactttatatgaatagaatcattcaagacgtactcatctgtacttagttctttggctcaacattatgtttgtgatttattcctgttgctgtgtctagctgtaatctgttagttttcattgccaaattacattgtttggaataaataaacataatttatacaaattacacttgatggacatctggactgtttttaggctttggttattctcagaataaccaaatacaagaatgttgctaagaacattttgtacatttctttttgtgaacatcttaatgcatttctgatagtctgccagggctgccataacaaagttgcaaagactatgtagtttaaaccacagaaattaattttttcactgttctagagactggatgtccaaggttaagaggtcagcaaatttggtttatccagaagcttctctccttagttgcagatgccaccttcccattgtgtcctcacaccatcttgcctctgtgctttggtgtctctttctcttcttataatcacatcattcctattgaattagggctccatcctttttgcttcatttaatcctgctaaccttcttgaggcccctgccaccaaataaatacagtcatattagtggttaggatttcaacatatgaattttggtaggacacaattcagtctataatggcatttatgtgggttatattcttaagtaataaatgctaggtcattgcatttgagtacattcaggtttaatagacactgagagttttccagattggttgaactggtttgcattgttgttggaaatgcaaatcagttcaaccaatctggaaaactgtcattgtctagggttccagttacttcataatattggtaaatatggcattgcctttctcattttatccattctggtgtgtatgtacatggcatatcactatgatttaattagcatttccttgatgattactgaaactgaatatctttcatatgttagtcacttggatatcctcatttgtaaaatgtctgttcaaaacttttggctacttaaaaaatttaattgtctgccattttctgattgatttgtggaagttctcataatcctggaagtaaaatattctttgttgaatagatacctagccaatatcttctgctagttgatgtatttccttttcagtccttagtcatgttctgattaatataagtgattttaacagggatgtttaatttataactttttcttttatggctagtacatttttaaccttatttaagtaatctttgcttggctttaagttacgaagattttttattttttaacaacagctttattattttacttttacatttagatctcccgtacatctacaactgatttttgtgtattgtgtgaggcttgggaaggggtcatgattcactttttccatgtacaattcagcagaccccaaatcatttatgtaaaaaacccatccttccttgctgcactgcagtgtcacctttgtcataaatcaggtgacagttctaataatcggtcagtttctgaatgtgctcttctttttcactggtctatatttttatccttgagtctatagcaaactttcttaaatataatagctttatatgtgactggcttgacttcttgtattaacagtaatctttgtccagggctattcttggccttttgcattttcaaacacgttttaaaattagcttattaatttccacagaaacaccttctggaattttggttgggaggattacatcaaatttataagtgagtttaggaagaactgatatttttaaaatattgaaccttccaattcatgaacatggtatatctcattatttaaatctttctcaatttctgtcagtacattttgtagttttctatgtagttgtctcatacatctttcactagatttattcctacatattttatgatttttaaagttattgtaatttagccaagtgattttattgccatccataacctctaagtatgagtagtttttaaattttgaataatattgatccaaagataatctagccaaatcataatgatcaagcagtatcttcacccattcctttgcacatttctttattgaataatcatttattgcattcctcttgtatgcttggcacagtgctagatgctaggcacacaaaataaggcacaaaataatcatttattgcatgcctcttgtatgctggctgggcacagtgctagatgctaggcgcacaaaataaggtggtctttattctaaaggaggtaacagttcatggttaaacaaacaataacaatacaggatgacaaattgaagaggtatgactaattaggaaacccagaatgatgctgaataataatcagaataattacagaagtcatattaaggagtagcaacagaaatagcacaatcacttcacaagggacaataataattgagcaaaatgaaggttagtgtgaaagaaaataatttgttaatattctgtttaaacttgtagcacataaagagaaactataaaaacttcttacagaatcatatcacaccaaattggtgctaaattaaactcaagcaagaaggtaggagccttggaatacagtgtgatctgtgttgtcttgatttaatgggtttttgaggagtaggagccataaacataaatgcaacaagtgatcttctccaggctggggccacagaagaaagggcctgtttaggtcaccaggaggaggaatttatctggaagcagtgggatgggaactgagacgaaaccagctccattatttatttacaaggctgctttaggaagtatggatccttttgttttctagaagaactataaacaaacttcttctctgtttatttgtataaaggataccactgaatttttgtaaacaaagtagactgttaggaataaaggatagtttgatttaggatatgtgtccataacatatattatctaaggagagttatgctgcctattgacagtggcaaattcacgatattaaagcaaacgtaagaatgatgaaaatacagcagtgaaagtgcaagggattgagaagtgaggattttgaacttctactagttctgaaaagcatgtctaatttaaattagaagtaaatggatgtagtagaaatatctttcaactaggaaagagtctcagtttttacacattttaaagctatttagcctctctggttttcagtttctcatatagaatatattgctttccttccatagcaactcacctaatagttgcactcaataaatatgagatacatgaatgaatatataggagataatcagtgggagagggtctttattgggtcttcttagttttaatactctctatattttctttaaacaatcatatattctcctatgggttacattttatttctgctattgactcctaaattataaatccatctcagatcattccttgaactctaggtatgtatatctattttcttttaactggacatctgcaattggatactccagctaaaaattgacatacctaatgtgaactcattgatttttatcttcttcccaacttgctctcctcctgtgcccctagtttagttaacagcattcagcaatggacccctttgcccaatataccattgatcacaatttcccaaaggggctatgtcctaaatagctctgggaagcaaccacttctctctctgttcatactcccacaatccttgtttaagtcattgcaaaaatggcctgcacaactctagcagcctttcaaactggtctctgactttagaatattctctttgaattgattgcattatttcagacagtgatctttctaaaatataactcaaatcccatcactctctgcctaaaatcattcaatgattccacattgccccaaggataaagtgccaactccctaaagtggtttaccatccttgttatacactcctgctttcctttccaatctcatttcttgaataaattctgtcttcggccagactgtgctgctttcctcacctgggctttatgctccactttcctgaccctgaacatgatgttctgcttgcctaattgcttcctccttccacccagctctcacctccagcctccacatctttgcctcctcacctgacaatattctcgccatctgtattatttcaatgtagaaatcatctttgtaaagatgtcttttccccgtggttgctactactcctttcctagcacatttgtatgctgtattatctgttaaatgtctgagtcccccactagatgaaaaaactttgtgagtatgtgaatgtttacctgtctgattcacgttcattgtgttgtctaattgtctggctcagcatagattattaataactatttataaaataaatcactctgttgcaatattaaaatactataatagaatgttaaataaaattataaggctgagacaaccgtttaaatttgactggcgtgggttggggtataaagaaaatgagagcctggggcacttcagaggcaatttatgacacataaagtacccttccggggcactttatgatgtcagaacaaaaaagttgtgcttttcgtttgggattttgggaatgaaccagagtacaatcctttcactgctgctgctgtcatataagctctagggacaataaagaacattgtgacctgaaaaaatagactttggaaaaagctcttaaaatctggggtgttacacaagaggatatgacatgtcttgcccagtgaataaggctcttcagaaaacttctaaaaagaggctgcatctgctttagttgcttagaggaatgcatattctctgagcactgttttctccaaaacattttgagaaatgggcctcagttttcttacttgtaaagtgggtacagtagaaaatgtacctcatcatcttgtacatgaggattcaataaaccaaagtaaataagcttttacaatggcctgacacctagtaaataccagataagtgtttgcttcctttattaccattgttatcaatttgactctgagataagagctaacacataaagtgagaggcattgttgtggtacatctgcagaagtcatttgtgttctccaagtccttccagagttcctctggggacggtgcatgagagtcctggggttgagttcctgcagtctggcctcaaaatctgtggctcctggctgagcttcagctaacagtatatctgagttttcctgtcaatcaaggatatcttatatgggactgagcaatttagatttgaaatgctaaatgtggaacaaatgttaccacatcagataggaatggaaactgttctttgtggagagataccaggatctctcttccttgggaagatgagctgagagaggaacacagagatgtcgctctgtgcagccactggcactggcccctgtgccaccttagttcttcagggtgagctttaattgttgtccagtgtcatgagtttcagtctctatgctattgtgagaaaattgtgctaaaagccactgagagaccacacaatgacagctggcacactgatacactgtgcgggttactgctagagttcaagtctctcagggatgctccagggcacaaaccctcagcctcgggtattcatccagggaggtttggatccgattcgcataaatcccagtgtggtagcaaggaatttcctgcctcctactgcttcaggacacctgctcaacccatttttagaaggctttcacagcccttttggggcattcccaggacaggtgggcaggaggtggtggccgtgggggctggacatccatcagacctgggatggagtggtgcctcacctggatctgcacatcccaaagaggtacccaaggctgggccaaaaggaaatgagtgtacgtggcttgtactttgaccagtgtcctgctccttgccttcctccccctgcacatggtgtgaaaaggagtggcgttctcccagacacagaccaactttggaaattgggattgtggtactatctgaaagtgtgcagcattttaacctcgagtgtgtaagtctaagtattgtaaaacatgtttttatattttaaaagctcttaaaggtaattttattttattgaacatcagaaactatctacatattcataaagaatgcttgattaaaagacagtatctcccagagcgccagaaattttagtgtagttacactcatttggaatcagcctaacacttaccatattcataattactaagaaattctaaggaaagtgtatgtatgcacatacacatcatatacatattcagaatatatgtgtatatagattatataccgtaaatatatatgtctgttacctgtctttttttctataaaaaaaaactttattcatgcctagtattaactcccaggcaaagcatgtatttaaggattaggctaatgtttaaaggttttcgagaaggctacaaccctgaaatattatctgattagaaaataaagttggtggttctgcagttagcctttggctttatttcagtattggttagtgttctaatgcttgctgagtttgaaaacttacgtgaaagtacatcccttattgatcagtaaatttatttgtatgttattgttgcagctgttaaatgagaaatttaattttctctccttaattcagtttggctttctgacatgttgctcttctctccttgaagcaagtgctgtttgcccattttccttactccagtgcctgtcacataaaagggcttagtacatatttcctgaagtaatgacttatcagatgcatggtcagtgcccctaaatcttgcttctcagtgttagtttggagcctgagaaagaatggcagctttggaaaagtaaatttaaaagtcagaaatcattaaaatgcacaaaaatatcccaaagtaaggttttcatgtgattctaccacagggcttattgatcttttctcatatttaggctttgtttctaggtgcccaatagaagctaccaaaactttaatagttgctaactcccactttttcattatactcttgctaagttgaaaagtcctctcctcttagaaacagaaatgactgtgctatatattggaatttccaaaagccaccagacaccaatgatacaccacagatgggtgtccctgagagtagaattagaactactcccctcaatgtggctgctgtgtcatcactagtgtactgcaacccctgccaaggcaggacagggggacgatgaatgccagctggattccagtccactccccagactgaatgataaggctctaccaccgggaatggatcatgtctgttcaaagccacaatggacagtgtcctcttctgtcattgcagctacaccatccaaactccccagatccctaaggaaactcagaagaacatgagcagaacatcacaacaatgggtgcacacaactctgataaaacatgtacatttaagggtctctattctctctaataggttaattcaggtgacatgataacaaaactgccatctacagtttgggacaggtagggatgaaagaggatagtggaatgggatcttttcaaatttatccagtggggtaaatggaggatcatttgtttcacggtagcaacatgaagtaactatagaagattattttcagagaaaaacaaaacaaaacaaaagccactactagtctgcctattatgcctgaaatgtcattgtctatctatatacttgcaaaggctattatctgctgaatttaagcagtaaaaacatcagaaaaactaaataatggtctatgtattggaaatatttgtaacagtttcttacattcataacattagagcacaaacatattcccctctccttttctttttctcttttgaattttcagtagaagggaacgacaataataggtataacttttattggattatactttaatttagatcactgaattatgtatacctatagcacccaaaatgctactaaagtcaagactctacatttaaataataaataagtaatccggttttactcacatccatcttccatgatggtccaactagacactccccattgtgactgttgatggaaaattcttccatgtttggagaaaccacagttactgattagttttagctgtaagagctctttcctccttctcatcaagcctaggcaaggttccacaaacaatattttttcccgtttgtctccactcagaagttcttaatctcttcagggaacagggaaaatgcaggagtcccctttgtacatcacttgaaataaataaaaaaattatccaaaactcatatcattacaggagtgactgttacaaagagaaagaagcaaattatggtgactagaaatgacaagagcttggatttttcttatttttcagcatgaaattctgagcttacaacctgcaaaatcctattataaaagtaagataactgccatataaaaactgaaaatcatgcaaatatttatgtgtgatcccactagttcactccataattttttggagtgtaaaaaacatttatgattttaaaaatcacatccaataaaaaaaaaacagagtcataaaataaaagaagaggaacacaggctctgcactgcactgaaacattttgaaatataaaatgaacaaccaatgctttacagcaaaaatatgatctcatcaacaaggtaggaaaatgagcaattgccttttaaaaggccataggttactagcacagtggttgtgagaatagatgtttgagcctaaccgtttggtttaaaaatctgacttttccacagagttcttaatgtaatattggtcaggttgcttcattttccttatctgttaaatggtgatactcatggtacctactttatcttgttattatgacactttgaggagttaataatgggaagtacatagaaaagagcatagaataatggtgtttggtaagattaagttattgttactattcttcaatttctaatatttcaaaagaaatacagacctgcactgaagaataattgacttcctcatgcttcaaagcttcattaaataataacaaatagttgattcctttttcagttgggaaagcaaattcagtcagtctcttagaatattactataaattgtttctgaattaaaactcatcccaaacaaatgaggagatacttttctgtgatttatgctatagtttggaaaaaggatactgttgtgccaggagttgaaaactgtactgagaaagtctattcatgctgactgcaaatattaccagtgggaggaaaatcgagtgtgtccaatttcatcactgataaatctagaatgataacagatctgcgttgagggcaaggtctaggaatgctcttcttatacacagaatgtttttgcttaatttcatgctctacagtttaaaggtcatttcttataaaattataataactgatgaggcagccagtgtcccgccctagagatttctatcttattttataagataaaactaaggtttcctttcaagttaaataaggattataatcttctttgtgcaaggggaaaaaaaagagtattcttactagatcaccttggtaagatttgtgattgtttatcctacaaaatatttaagttttgaaattatttcctttttcctccaggagagtataaagttttcccttgtgattatttgtttttcttcaaagcatattagcccatatttatcacagccatggtctccatgtcaacgagagaagatgccatgtatctcttaatttagcagcactttttgttcgggtttccagataaagcacaatacaagttttaaatataaagagaacaggctgtttctcacaaagcacactggtgttcataggatgcgaaactgggcccccgtggtgtttgataagaaaggagttcctagcataaagatatttttagcacatctaataaaacatcagttccatctgcatttccttaacatgttgtgctaaattctccctccaacattccaggattagtttgttacccaaagtgacagggaaaagtcactttagatttttctgtcaccataggaaaaaatgaaaagctgttattatattaacatatgtttctctttctttatcaaatacacaacagcatttgggtctctactaaaaattatcatacactttaaatgatgaactgagcctcttgaacctttttatttattttgggactataacatcaatatgtttaaatcaaatatttatttctgtgtctgtttcagacatgactcctaataactgaaaaaatagaagtttatgtttacttctctacatctctttccctaaacaattaactaacaattagctgttgacttcttcattcactgagatcttagttaaaagagtatatatgtgtgtgtgtgtgtgtatgtatgtatgtatacacgtacacacatatatatactattatatactatatataatagtgtatatatatatacacacacatacatgcacagagagagaacaataaaacataatgaaaagtgatatttcaaaagatctgttaagtgaaatcttagtcaaaatataagctagttgccaatatatagaaaggtttattatgctataattggttttgtacatgatttgtaatatctctccctcttccatgcatgtaattttgatttaataccaggttgataattacctggccaaaattagatttcttattcatgtaaaggtagatatcaaatttacatatcagtaatgcaaatgggaaaaaattatttggggtaatttattttgattggaactatttgtatcactgctcaataaatctattatttgattttatttctaaggcattattaaagagatttgtcagaaaaaatacatttatatatgtgtttatatatgtatacacatatacacatataataaaatagaagttggagatatatatgcatgtgtatatgattgtttgtgtggtggtacataggactacattacagaatgtttttctaaagttaggaatttaaagggtgaatatcatactaggccacatcttttgagctgtaaaaaaaaaatcactaaattttacagatttgaggttttaagcttaaaattttagttgcatttttaaaaacttgaaagcagttgacaaactggtttcaaaaagaagaattaatattgcaaacatgaaattactcataaagctaaatctagacaagatagaaataaatttttgaacatttaaaatccaagtttatttttaaagcacatatgttttacattagaaggtgtagccgtaccaatcatctcttcctctaaaatattcagagtacatttttagaacattgtagcaacacttaaatgccagtggttcattattttaaaagtgttgccccttttaacaaatgcatgattaatattgaagtatagcttttattctctttttaaggcttcagacataaagtctattttatggtttataaactaatgggagacatagtgacttctttcattgctaggaagattttaaatgttctttttgggaggcatagggattaattttttttttcctgcttgagaaatgttaccttctgagaaaaaagcaaggcactttttctactgttgtgattccttaaaatagttttcttcccttttgttttgtttataatacccttcccaactcccttggtcatctgagcatggctgatcacttcacgtctctttttttgattcatgaatacagaattctaactttatattaaaatgaagaacatatttagttctcaagaataagctcatcctgggaatatattgcatgttggcagatgtattaaaccagaaaaagaacataggagggatgtggccctccttgtgagcaacactctcatggttgagtccttaccgagggttaggaaaacatcctggtatatacatttgaagcttattggtttcctgagctaagattagggattaggacaagaggtgtggctggaatctcttcctgaagattgtgattctgggactcggaggagtcaagaccaaggttcccacagcagagccagaaaaataaataaataattaggcctacacctctgacatttgaccacccccttgggtattgtgtcttggtcctaatatattttgttttcctagtttaggctggaactgtgtagagcattgagcaaatactttgttcttaccaaatacatatatatttttggactgtacaaatactaaataagaataaccatatactttttttttgagatggaatttcactcttgttgcccaggctggagtgcaatggtacaatctcggctcatcgcaacctccacctcccgagttcaagcaattctcctgcctcagcctcccgagtaagtgggattacaggcatgcgccactatgcctagctaattttgtatttttagcagagacagagtttctccgtgttggtcaggctggtctcaaactcccgacctcagggcatccacctgcctcggcttcccaaggtgctgggattacaggagtgagccaccgcgcctggcatgtagtccaccaaggaggtgttgagcctctctcttgctagacaacctatcaggcaatattttcttataaattacttcaataatgattactcttgaatcattaactttgtacattttttccagatgaggatttgtgctaaagcttcatttaactattttggggagcttgttaccacaaaagagtcaggacaggctcaaaatcagccagaagtttacctattcaattcaacaaaacaaaacaggtacctatgatatgctaggctggatagcagctgctggaaggtttagaaatgtattgccgtctcttatttctttctgtcttggatttcgacttatttcaaaaataaaaatagccacactgttgaagacaatatgacggagactttggaatcagacagatctgtcccaagtctgtgactaccagtcatgcaacctcagaccatcatccagtcagagcctgggctcctgtaaatgagtgtggtcaccactcactcacatgctgcagggttggacacatgccaacatacagtaggggacatgggctaaacatccgaaaaatggaaaatgctcttattctcaaggccaggccaatgtctacattccaaaatagtagcattttaacctatctatacattttgaattgtgaaagaattcattgcttcttaaaaatatagttgacattctaagcagagctgagtgttgactaaaataaactgggctagtagttatcatagaaatgttgataagattacctggtattcattatacttaaaagcaagactggtcctaggtagaagtgacaagctacttcagtctgtttttcccaccttcgtacctcccattcatcttcctttcataattcacacactaactgcccagaagcttctttctctgccttgacattgttaggtggcctatttcagtaaaaagcagtctctctgaagtgttggctggtactatttaaaactctgttagctcacttgatgctctgcattttaataggggtctcttgaacacacaggagttttatgtatttttgtttttttctggtttttttttgttttgtttttttgttttttttgtttttttttgagacggagtctcactctgtcacccaggctggagtgcagtggtgcagtctcggctcactgcgacctctgcctcctgggttcaagcgattctcctgccttagcctcccaagtagctgggattacaggcatctgccaccatgcctggctaattttgtatttcgggtagagacggggtttcaccatgttggccaggctggtcttgaactcctgaactcaggtgatctgcccaccttggccccccaaagtgctgggattacaagcgtgagccaacacacccaggcacacaggagttttaaacccaggagaattgtgctgtcatgttaggcagactgtcttctctgtagctactctctctctctcagaaagctcatcgattcttatgacattaactttcatttttatttttattatccttaaaaatataggtcaaagctatctgtctctttctcccaagttttggtactgcaatttcttaatggacatttcagttcaacagatatttgtgaggcatctcttattacatgtgagacgaggatcaatactttacatgtatttaaaatagacaccaagtttatgtacctgtgaagaaatatttttgttctcttttccataatcaatttgtactatgatttgtcaccaagtcctatcaattcttcttttaaagaattgccatcaccttacacttagaagatacattaactagttatcttaaaaacaaggattataagtcattctactataaagacacatgcacacacacatctttattgcagcactattcactatagcaaagacatggaaccaacccaaatgctcatcaatgatagactggataaacaaaatgtggcacatatacaccatggaatactatgcagccataaaaaagaatgacttcatgtcttttgcagggacgtggatgaagctggaaaccatcactctcagcaaactaacacaggagcagaaaaccaaacaccacatgttctcactcataagtggtagttgaacaataagaacccttggacgcagggacgggaacatcacacactggggcctgtagggagtggggagcaaggggagggagagtattaggacaaatacctaatgcatgagcggcttaaaacctagatgatgggttgataggtgcagcaaaccaccatggcacatgtgtcccagaacttaaagtataataaataaaaacaaacaaaaatacaagaatcttccagctcccatgtgatccctatggcaagtgcaaactgattcccttcccttcacctcctcacttcacctcagtagcactgagctctgccactatatagctctgtgactttgaacaatgcatcggtttatttatccacaaaatataacgaacaatacctgccctgcctttcttgcaggattattgtaatgatcagtcaaaatggtgcgttggaaatcattttacatagtaaatatttatatcacactgttaggaatagtattcttgttttctacctcatcttgacgtgaatgagacatagttcaaatcttgaatcctccacgtattagtcatgtgaacattaggttacttatttagactctcagaaccactacattctcatttgtgaaatggagacatgaacctccatgcagcctgatgtaaggactagatggagaaaacgttgatagaagtaccaaagactgtgcctactgccaacttgcatgccataatgttagttttttctttgtgttctaattggttcaatgttttttgtctttaccagtctttcttaatcttacctgtaggattttatttctatttttttggacaaactttgtattttctagggagattgatgagtgagtgcattttctgtggctgctataacaaattaccacaaacttaatggcttaaaacaatgcaaatgtattttcttacagttttgaaagtcagaagttcaaaatcagtctcactgggctaacatcaaggtgtctgtttcttctggaggctcaggggaaacccatttccttgccttttctagcttctaggggctgcctgcattcctcagctagtggccccttcctcaccatactccaatcttaagcttttgtcatcacatctactactcactctgatctcctgttcccttttaaaggattcttgtgattacattattaggatcatctggataacccaggctactttacccatctcatgatccttaagcacatctataaagtctattttgctatataaggtaaaattcacaggttgtggaattaggatatgggcatcttttgggttcagtataccacagtcagttgcctgaaattcccacagacttcttatggtcatggttaccttttaccctttaccaatttacattctccttcctcaaatttttccttttttatttggtctaaattctactcaatcactttgaggcataccattaagtctgtagatctccatctgttgaagttggagtatagatcaatgcttagttatgcacttttttcccaatgtttactatttcttactaaatttcagcttctctcattcaggaacatatctttttgtttatttttaagttacacaatatactttcatttatacattcattcaccaacgtgttctcaagcatctgctaaaagccaagccttatattcagtgcaggagatacaaagctgagtgagcatagcacagtcctcatcttttgagaactcatcaagtggtggaagtgtggtagagacagtaaagctcatattccctcaaatttcccagcttccttaccagtagggaggctaatatgatatgatatggtcatgaaatgtgggcaatattgatattgtgccttctctgggatgaagcagtgaaacacttacatgtagttctttggttgctctttgccactgggagcagctacaagatgatggaacttccaacagcctgaggttctgagagaccacgtgcaacaaagcctcttgcaaattcatgtgggacatggaaacgtgaaagaagaaaagctttgttgtggcaagtcacatgaaatttaggagttatttattaccccctagtcaatcctacccaataccgaaaaggaaatctgtgatcctgtatcataggcatagcatgatagcatatactaatatttggaggtagaaaactgttccaaatgagaacagagggagtacttgagttgattcttaaaggacaacaagaaggtttgagatggatgaggtgtgagaacaagcattttcccaaagagcaaatagcacatacaaagacttggaagcctagacagaattcagatggcagggaaagggtataatttctgtgggggtaggggggagactgaggccagagctagaggtgagagggcattggatgccattctaagacattttattttcattctgtaagctagagtttcttaaaaatttttttaaaaatttgttcatttatttctgtttaaaatagtaatacaactatattatgtaaagttagaaagacataggaaagcaaatgaagaaaataaaatcatcactaatactatcacattgagaaataactgttaatgctgctttcatattttcttctagatattgctctgtgcatgtacagatttgattgtgtctccttaaaattgggattatgttgtatgagaattattttgtctgtttaacctttccaattaaaagtcttcaaaaagaattctcagtttgggcggataaaatttcagtgactaaaagataactcataattcatttagctatttggcatttaggaaatatccattgttatggagattatccatctaagcagactttaaaataatcagtttaattgtggaataatgtatatagaagaaatgttatctattttaagtgtaaatttgaggggttttgacaaatgtgctgtcatgtaactaccaccatcatccagattagagcatttctatcgccacaaaaaagtgtccttgtatccctctgcagtcaattccttttagcccttcccagcctctggaaaaccctgacatgcattcagtcagcagagcacttattggcttcaatttcagataaatgaattcgtgtctgggctttttcacttggcataatattttggaaattcatccttgttgtttatctattaattatttgaagaaaggtcaacttgcctctagtttttggctaataaatatgttatgaacattcaggtacaagtttttgtgtggctgtatctttacatttatcttgtgtacctaggcaggttgattcctcagtgttttaagtgtagctataactccataagaaacaaccagactgttcccaccaacagtgtgtgagacttcctcatgttttataacctcaccaaatcttgttattcatgatctttttaattttgacgatttttgattatgttgtttcttctcattgacgtgttaaaggtttttatatattagatacaaatactttattatgtatatgtttgtacataattattttatatatgtttacaattattttatatttttaatatatttaatttatatttataattttttatatatgtgcttacatatatataatatacatatataaaaattattttatatatatattttatatattactaaatccaagaacaaggagtgctgatgtcccatataattatatataaacatatacataataaagcactacagaattcttgttacatatatagaacaatatatttatataaacatatatatatattgctctgtgcatgtgcagatttgattgtttttccttaaaattggggttatgttgtatgagaattacttaactgcttaggaaaaccattaacaagcataaattctaactatttgtcacctaaagcatacaacttacatcacctatttgagaagcaactcattgtcaagtaaaatgtcatgagttaatgtgatttctatttcatgacttgcatgtgatccactatctgctgtctcttcccaatgcaaattaattttcatggcatatcttccccattttgcaaatttgtgggcctcttgtaccttcctctattacaagtgttctggggaatgaatgcctaactcatgacatgcttaatatgacacatatacatttaattttgtaagtgccatgtaatacatactttttaatttgattaaactctgccaagccatttttgtatactggagtgatagataactacaaagacaaaaagcactattttattcacataaatcttcttttcttcctgtttccaaacttgttgataattatcttcccctactttgccttactatcccttttttcttttgtgacttcttgcattaaatacttattaacttcttttcagttttaatcatgaaaatatataaaattatacatttaattagtttttagttttattttgcattgtggtgaaagaagacatcatattttcttgttcgtgatgttaaagtagcagtttctcactgcaacaaccaatgtgcaaaataaccagctagcatcatgatgacaggatcaaattcacacgtaacaatatcaaccttaaatgtaaacaggctaaatgcctcaattaaaagatgcagaatggcaaattggataaagtcaagacccatcagtgtgctgtattcaggagacccatatcacgtgcaaagacacaaaaaggctcaaaataaagggatggaggaatatttaccaagcaaatgaaaagcaaaaaaaaaaaaaaaaaaaaaaaaaaaagcaggggttgcaatcctactctttgataaaacagactttaaagcaacaaagatcaaaaaagacaatgtaggagattatgtaatggtaaaggcatcaatgaaacgagaagagctaagtatcctaaatatatatgcaatcaatacaggagcacccagattcataaaacaagttcttagagacctataaagagacttcgacccccacacaataatagtgggagactttaataccccactgtcaatattagaccaagcagacagaaaattaacaaggacattcaggacttgaactcagctctggaccaagcagacccgatagacatctacagaactctccaccccaaaacaacacaatatttattattctcagcaccacatagcacttattctaaaattgaccacataattcgatgtaaaacacttccgagcaaatgcaaaagaacggaaatcataacagtctctcagaccacagtgaaatcaaattagaacttaggattaagaaactcactcaaaactgcacaaatacatggaaactgaacaacctgctcctgaatgactgctgggtaaataatgatataagacagacagaaataagttatttgaaaacgaatgagaacaaggagaaaatgtaccagaatctctgggacacagttaaagcaatgttaagtgggaaatttatagcactaggtgttcacatcacaaagtgggaaagatctgaaattgacaccctaacatcacaattgaaatagagaagcaagagcaaacaaattcaaaagctagcagaagacaagaaataactaagatcagagcagaactgaaggagatagagacatgaaaaatgcttcaaaagttcagtgaatccaggagctggttttttgaaaagattaacaaaatagataaactgctagctagagtaataagaagagagagaagaatcaaaaagacacaaaaaatgataaatgataaaggggagattaccactgatcccagagaaatacaaattgccatcaaagaataatataaacacctctatgcaaatcaactggaaaatctagaagaaatggatacattcctggacacatacacccttccaagactaaaccaggaagaagtcgaatacccgaatagaccaataacaaggtctgaaattgaggcagtaatcaacagcctaccaaccaaaaaaatgcccaggaccagacaattcatacctgaacaacgaggagctgctaccattccttctgaaactattccaaacaatagaaaaagagggactcctccctaactcattttatgaggccataatcaacctgattccaaaacctggcagagacacaacaaaaaagaaaatttcagtccaatatcccttaagaacatcgatgtgaaaatcctcaataaaatactggcaaactgaactttttgaagcagcacatcaaaaagtttatccaccatggtcaattcagtttcatccctggaatgcagggctcattctacatacacaaatcaataaatgtaatccatcacataaacagaaccaatgacaaaaactacatgattatctcagtagatgcagaaaaattcaacaccccttcatgctaaaaactctcaataaactaggtattgatggaacatatctcaaaataataagagctatttatgacaaacccatagccaatatcactgaatgggcaaaagctggaagcattccctttgaaaaccagcagaagacaaggatgccctttctcaccactcctattcaacattgtattagaagttctggccagggcaatcaggcaagagaaagaaataaagggtattcaaacaggaagagaggaagtcaaattgtctctgtttgcaaatgacataattgtatatttagaaaacaccattatctcagccccaaaactccttaagctgataagcaacttcagcaaaatctcaggatacaaaataatgtgcaaaaatcacaagcattcctagacaccaataatagacaagcagagatccaaattatgaatgaactcccattcacaattgctacaaaaagaataaaatacctaggaatacaacttacaagggatgtgaaggacctatttaaggagaactacaaaccactgctcaaggaaataagagaggacacaaacaaatggaaaaacatttcatactcatggataggaagaatcaatatcatcaaaatggccatattgcccaaagtaattcatagattcaatgctattcccatcaagctatcattgactttcttcatagaattagaaaaaactttcaattttatgtggaatcaaaaaagagcccatatagcaaatacaatcctaagcaaaaagaatgaagctggagtcatcctgctacctgacttcaaactatactacaaggctacagtaaccaaaacagcatggtactggcaccaaaacagatatatagaccaatggaacaaaacggaggcctcacaaataacaccacatgtctacaaccatctgatgtttgacaaaactgataaaaacaagcaatgagaaaaggattccttatctaataaatggtgctgtgaaaactggctagccgtatgcagaaaacagaaactggcccccttccttacaccttatgcaaaaattaactcaagatagattaaagactaaaacgtaaaacctaaaaccataaaaatgctagaagaaaacctaggcaataccattcaggaataggcatgggcaaagacttcatgactaagacaccaaaagcaatggcaacaaaagccaaaattgacaaatgggatctaattaaactaaagagcttctgcacagcaaaataaactatcatcatagagaacaggcaacctacagaatgggagaaaatttttgcaatctacccatctgacaaagggctaacatgcagaatctacaaggaacttaagcaaatttacaagaagaaaacaaacaactccatcaaaaagtgggtgaaacatatgaacagacacttctcaaacaagacatttatgtggccaacaaacacgtgaaaaaaagctcatcatcactggtcattagagaaatgcaaatcaaaaccacaatgagataccatctcatgccagttagaatggcgatcattataaagtcaggaaacaacagatgctggcgaggatgtggagaaataggaatgcttttacattgttgctgggagtgtaaattagttcaaccattgtggaagacagtgtggcgattcctcaaggatctagaaccagaaataccatttgacccagcaatcccattactgattatatacccaaaggattataaatcattctactatgaagacacatgcacacatatgtttattgcagtactatttacaatagcaaagatttggaaccaaccctaatgcctatcaatgatagactggatgaagaaaatgtggaacatatacaccatggaatactatgtagccataaaaagtaatgagttcatgtcttttgcagggacatggatgaagctggaaaccatcattctcagcaaactaacacaggaatagaaaaccaaaaactgcatgttctcactcataagtgggagttgaacaatgagaacacatggacacagggaggggaacatcacacactggggcctgttgaggggtggagtgctaggggagggcgagcattaggacaaatacctaatgcatgcggggcttaaaatccagatgattggttgataggtgcagcaaccaccatggcacatgtgtacctatgtaacaaacctgcaccttctccacatgtatcccagaacttaaagtaatataaaaaattttaaaaagaagcagttccttgatggttttattgtgaacttaataaatataatgtttgaccatattcaaatgatactcaaaaaacagtgaattctaaatatttgtaagacccaattttccacataggtatgtctattaatcagagttctcaagaaaaacagaatcattagaatacatataaatatatgtagaagagatgacttattgtaagaattgggtaatgtggttatgaaagctgggaggtcccacagacttctgtctgtacgctgtagaaccaggaaagccaatcatgtaattcagtcatattctgaaggtctgagactagggggtgaggagaagggaggcaatggtggtgtaaacctgtaccaagtcgaagaaccagtagtgttgatgtcatagagcaggagaagataaatgtcccagctcagacagagactgtaaatttgccatttctccactgttcgttctactgaggccctcaaaagatttagtggtgtctgtgcatattggggagggtcatttgttttactgagttcaccaattcaaatgcagcttcctttcatcattcacacacttactgcccaaaagcttctttctctgccttgacattgttaggtggcctatttcagtaaaaagcaaagtctctctgaggtgttggctggtactgtttaaacccctgttagctcattagatgctctgcattttaataggggtctctggaacacacaggagttttatgggattttttgttttgttttgttttgttttgagatggggtctcactctatcacccaggctggagtgcagtggtgcaatctcggctcactgcaacctctgcctcccgggtttaagcgattatcctgcctcagcctcccaattagttaggattacaggcacctgccaccgtgcctagctaattttgcattttgggtagagacggggtttcaccatgttggccagcctggtcttgaactcctgaactcaggtgatccacccaccttggcctcccaaagtgctgggattacaggcatgaagccaccatgcctggcccacataggagttttaaactcaggagaattgtgctatcttgtgaggcagactgtcttctctgaagctactctctctctctcagaaggcttatcaattcttatgacattaacttgcatttttattgttattatccttaaaaatataggtcaaagctgtctgtctctttctcccaacttttggtcctacaatttcttaatggacgtttcagttcaacagatatttgcgaggcatctcttattacatgtgagacgaggatcaatacttcaaaagtatttaaaatagacaccatgtttatgtacctgccaagaaatctttttgttctcttttccataatcaatttgtactatgatttgtcaccaagtcctatcaattcttcttttaaagaattgccatcaccttacacttagaagatacattaactagttatcctaaaaacaaggattataaatcattctactataaagacacatgcacacacacatctttactgcagcactattcacaatagcaaagacatggaaacaacccaaatgcccatcaatgatagactggatgaagaaaatgtggcacatatacaccaaggaatactatgcagccataaaaaagaatgagtttgtgtcttttgcagggacatggataaagctggaaaccatcattctcagcaaactaacacaggagcagaaaaccaaacaccacatgttctcactcataagtgggagttgaacagtgagaacatatggacacagggaagggaacatcacacactggggcctgtagggggttggggggcaaggggagggagagtattaggacaaatagttaatgcatgtggggcttaaaatctagatgatgggttgataggtgcagcaaccaccatggcacatgtgtacctatgtaacaaatctgcaccttctctacatgtatgcccgaacttaaagtaatataaaaaaaatttaaaaagaagcagtttcttgatggttttattgtgaacttaataaatataatgtttgacaatatcgaaatcatactcaaaaaatggtgaattctaaatatttggaagatccaaattttccacataggtatgtatgttagagttctcaagaaaaacagaatcattagaatacatataaatatatgtagaagaggcgacttattataagaattgggtaatgtggttatgaaagctgggcggtctcacagactgctgtctgcaagctgtagaaccaggaaagccactcatgtgattcagtcatattctgaaggtctgagaatgggtggtgaggagaagggaggcaatggtggtgtaaacctgtactaagtccaataaccaggagtgctgatgtcatacagcaggagaagataaatgtcttagctcagacagagtaaatttgccctttctccactttttgttttactcaggccctcaaaagatttagtgatgcctgcccatattgtgattaccctcacagttacagctggaaatgctgttttgccagctatctgggcatctcgtagcacagtcaagttgaaaactagccatcgcattatgtttctattgattaacagaattaaatattaaattagaacataaaaactaaagtaagtactaatttaaattctcattttgttattcaaacactctattcaatttctgtattttaataaactttgattgaaacttaaaatatgtagaaaaaagtatgtaaatagtacacatttgaagagtgatcacaaatagaacacaacagtgtgaacttttccaggtcaatcaattgccacctatgtcttttctatccacttgacctggtggacactaagcattgtatgcagctattgttcctaaatcattgttcgaaatggagattcccagctcccgtccaggagctgctaatcagaatcttggtggtgggtctgggagcatctgggaaattctggaacgtcttatcaagtgatagaatttgggaacagatgtttttcttcttgaattttaactgttttgagttgtcttaattatgcattttttactgaagctacagttcttcaaatgatttgtggtactgctactgctctctcctagtttgagacttatgttttgctaccactagaatgcaaatgcatcacactgtctccaaagttaccctcccaaaagagagttaagttcaattaattccctccctaaatattgaatgccaactggtgcctttagataaaccctaagttcctgaagctgtcatccaaagcatgtcattatttgggcccattctgcttccatgtattcctcctttcaccccttattaacctgtaatttctcaaatgcagcttcctcaaaccctcacttatcaccacaggggcccatcctatttctgatcacccttcgctcaaccacataataaagtttgtcatttctcgacaacaactccttatctcattgcttatgttagtcattccacctggaatgccccttccctcttttctttgtgtatctcaattccacccatccttaaaagtttcccatgcaataccatcttttccattccccagtaagaaatataattacatgtgcatttgattttctgctgtcagagattgtgcagctttgaacattgcatctgccttttcccacagctgggactacctaattgtcccttgcagtctcaactccatccaagcttctaagacctatcttagccttgttgagaaagaatttcagaatctgatctacacttgtggaactcaggcactcgtgttgtaatccaatatcagtgtttgacccagcactggaaactaggttttagccttattctgggaaacttcatttctgtttatggaaattagacttcagacttgttagtacttcacagggtcctattttccatctctccctgtaggatcacccctgctgttgtcaggctcatctccaactaaaatgtcctagaggctcatgcctaaatcccaccacacaggctgggactctcatttgtaaatacctccctatggctgatgattgtcttcctggtattgactttttgaggactggatccctcaactgtagccaattgttgctagtcctgtagcttcaccctgggttgcttctttggcttaaagcaatatccctccagagccatattgagcatgtgatatattttacagcatcctacatatttttataacttaaggaaatgcaattaatataacattaaatggaaattatgtgaaagcttagtttttctctgatgagttaaagcagtgagctttctgaaggcatgtatttcatgacacagttcatgtcagcagtttttaaaaagaattctgtccttatttcacacatttcttttcaagagaaaatgttgagtacataaagagtttacaagaataaagcatttaaagtttaatgacttttaaataaattttttatcctaaaacattactagtcataagcacactttcagatttatattctttttttaaaaaaatctatatttaacatagatgaggcagggtattagaaagttctacaaatatattagggttctgtatttttccataagcagaatccttgaaagagcatgtgttgggttatggattttgtttttttaaaatctggtcatattaaataaattagaaaggcaaattgaagataacactgtaatatattgctaagttaccaattatatgaccattattattatactataactgcaaagagataatagatgtgattttctccctcccttttttagtgcctcacaagcaaaattattcacaataaaataaacttaatatatgccatataataattggaacctctcctactccagcccatccccaattattgtatatatgaagtatatccttttttcacacacctcccactagaggcaaaagaaatgttttataggtagtaagcaaaaaggagatttctcttcttctccttttttcccctctcctattgttttatagtctcagtaacccaggtgatgtagtcagctccatcttcaacagcacagatgaccaattaagccctcaggggtgatctgagcagcacccctttcctaggaaaagctttctcattgcctaccatgtaccagatttccaccataagagatgggttcctttagatagtgttatatttccaagaatgacctataataattacatttgcaaaattttattggtcagagtagaacttgaggtcccaaaatgtgtgtgagagagaaactttacataggcagagaaatagaactgaagcattaaggaaaagatctagataatatgccattgagaaggggtacaggcagccagaaagaacatacagagactcagtaggacaaaaaaaaatcccttgtcttctttcttttcctttcctgctttttttcagtctggctgaatgtgttgcccttgggatcaaccaatcactgcagcacattcacacttttcttggccatgtagtagcaactccacttctaccctgataattatcttgctttactcttcttctttaaacaaatgtctagagaatacaaagaaagtcaattttattaattacgttacatggcttgacattttaaattgtacttcataaaaagaagttggaattcacagctatttgggaaaaaaaagcagtagagaggaggagagatccttatcaagctcacatcaagatataacttgttttaaaatttataaaaatagaaaattacagtgtatggcacatatcttcatatcattataatagctgatccttttcagaatatgctttctaaactttcatttgtttttaaacactttttagtttaaagtattatgtatttaaaaatgtaaaagtcatcttggcttgtgggccatacacaaacaggcaatgaatcacatatggcctgtggtctgtagttcgctgacctttgtcttacataaatgaattagttcagtgtctagaacatcatgagtagtgacttatatgattaccattattccttaaggaacttacactcagtggagcaaatcttaaaagctaattcagaggtcggataaattacatatgcaaaaattataaaaagaattttttaaaaattaacaatggaacctccctcttttccctattccctaaatactataaagaaaaaaaattttttgaatgaagactttgatgaggtctgagacagaaaccctcaacactcttaagaaacaatggatggtatgctttttaaggtggaaagaaacatcttacttctgattttctttatttttttcacttgaggtttgcaagctgaaagtcaaagctgaattgctcaggacaatagaacaaagctgagagtcaaagctaaattgcttaggacaataaaagagattatagagattgtgtgtactggacagatcagtgcagttaaggaggacagaaacttggttaaaaatgggccttgcagaaaaagcaaatacagtttaaaggaaattaatcatatatcacagtgaaaaaaattttcgtttttccacaaactgtattatttgctagtatttagttaagctgggtctcttttagaatgagccttagggaatgtgagaagagtctatttacggactttggctaagccaaagccaatcatggaggatggacacctgtctgggattcatgcagtttagtgaactgattgagagcacaggttaagagtcaaacagagctggtttgataggtaaaaacctcaggtttttaaaattagcagtgtaagatgggaaaactacttaacttctatcagtgttgacagctttgtttgtaaaataaataaaaattattgttttgctttagggataaaggaaattgtgcctttaaagcacttagaacaaaatatggtaaagaatacacgccctggaaagcctaattattattgtatgtcttcatgaagcccacttaagccatattacctgtgggaactgcagatactgggcaagcaactcctctggaggcaaaggctaaggacacgtggaggaatcagaggcaagaaacccaacatggcataagctatcagtgacactaactcaagagcagatgatgggaggcctgtagccccagggtctggggagtagctccaaacagcccaatggatggaataccagataagaggtcctgcatttagacttggctaacattccagaagtacttttgatggcccacagcacttgtctattgacattttgggccagatactcctttgaggtagtagttgtcctacatactaaagaatatttagcagcatccccggcttctacccagaaatgttttatcatcagcataacccaatgtcccctgggaagcaaaacatccctggtcgagaaccagtgatatatgaggacagttttaattccctctgatgatctacagaaataatggcacaaggtcaagggagtggactttgcggaaaacaagaggtcctcagtgaggagacaagctggtgaaacatgatttacttacataaggatacaaacactaatggcatgtacccattggtgaaacatttagggctccttaaggatgtgtgatttctgttctcagtcataaaatagaatggaatattttgaagtacacgctggtaggtgttagcttctgaatctaagaagtctagaggtcccccagagctatctttggctcttagcacctttatacttcatgttcctttgcctgaaacttcctccctgaaggccagtacccatacagccacctacaggtcactcacctcactcctctttccttgaccaattttcctgaatctttcctatctcagaagctattagttctgggtatccttccctgaagctctagactggctggatatcactttcccgggctccagcctgcttagtggtctattgcttcttctggactaacatttcctgagggcaaaaacaatatcttgttctctcatgtattcctaggatctagcatggtgtctggcacatagttggcaatcacggggtatttgttgaataacttggtagttgctttgcaggaaataagcacatctggggtaatcacatttatattttgtttaaaaatctctatatttcaactcaaaaccagtcaagttccacatattctcagttatgcatgggaactaagtcatgtgtatgcatgcatacacagtgtgtaaaaatagacaatggagacttggaattgtgtgtgtgttgggggggtgaaggatgagaaagggggatgaaggatgagaaattacaacatacactctttggatgacggttacactaaaagtccagacttcattactgtgcaatatacccatgaatcaaaatggcatttgtaccctctaaatttatacaaaaaattctctatttcagctgctacttaggagcaagtaccattttatgaataaagcaccattgaagtcattgctattccttgaagccaaaaaaggtgatattagatttagaggtaaactggttagtgctaaagaatcaagtaatgaaactaaaacccaccgtatagtgtgaaagctgaagaggccttactccactttgagtagatttttctcttctgtaattttcaaaggctgtgcttagaaactgtttttctcattttattccctgttacttattgttctgctgtgtggattttttcattagaggtctatttgtgcctggtttgccttgagggaagggatgatacagaactctcatctgtccctgttactatgtattattacttgggcaatgtcaaggcaaatgccatataaataaataaaacactctggaagcttcagttctcactgctaggcagcaaaaagagcaaatgtttaacttttaagagatagacttaataaaaagctgccattttcccatagtatgagagaaaaaggatatttttctcaagcatttataatttggcattgaggattaataaaatgttattgagtctggctttgttatctgtctgtaacaatggttatttggttttatcacagcctggaaatctcagttctatggggcttagtgtatatactcagctattgcataataaaatcaatctattgaaaggaacagaatcttttattaggtgagggtgggcagaagagattaatttttcatcactccgaaggctcatttctggttaatcttgttttggtttccccaatcatgtggagtgtcagtaaaacccagtcagaattaccatcttctgaactccatgcgagaaaactccattactcccagatactgttggatcttccaccaggtactcttcttggggtagggtgttggcggttcaattgatgtataccttctgtgcagcagacagctaacatgtaaatgtagagattgtcagcacaaagaggatagtgcaattattttaacacaagtagagtaaatcttctctattttttttcccaaaagtgaaagaatgcttccagtattctttctgtgaatactttcacttctttcccggaagagctgataaattgagtgttctagtaaaataaacatccttgataagagagattcactacactgtccctaatgtgatacatagaccatcatagcacttgccacatatggattgcacattttcaaatcattaaaatcctagagttctaaggaccctattgcagtcagatactatgtgatagctatttgccaaagatggcctctagtatccatgcttttgcattgtccctctcatattgaagctgggctgatcctgtgacttgctgtttcaagagaaggtggcagaagtgatgatatatctgaacttctgagagcctgagcttccacataagaagttctgttgccctgaaggagagaccacatggagagacaacatggaaatactatacagagaggtcatatgaagaggggacaccccgaggctgtagggagagagaaagggaagcccagatttcctaggatcccagctgatcccagctatccctgccaaggtgctaggtacatgagtgcatccatcttggacattccatcttggatattgaatatggagctcccatctgactgcaattgtgtaaggagctatgagcaagaccagcaggagaagatacagctgagacacagtcaacccacagaatcctcagaaataacagaataattgttggtttagccacaacattttgtggctaatttgttatgcactcatagataacaaaggtagacaccctaaaacacgaataatttagtctagccttcttatattgtaggtgaggaaactgaagaaactgaagaccagagcaatgaacccatttaaccaatgttacaaagtaatttagaaaaaaaaaatgctggaattagaagtcatatatctggagttttaattaaattgtctgttaaccttgctatgctgcttaatatatcactgtggcccagtaattccacttttgagaatatatcattaggaaataatgagaacaaattgtgtctcaatatgttcaccatactataatttataacaaacaattggaaacaaactgtaagtaaaagtatagaggaacagtgtattagtccgttttcacactgctgataaagacagactgggcaatttacaaaagaaaaaggtttaattggacttacaaagaagcctcactatcatggtgcaaggcaagaaggagcaagtcccactttacatagttggcagcaggcaaagagagaagaaggaagatgcaaaagcagaaattcctgataaaaccataagatctcctgagacttattcactgccatgaaaacaatatgggggaaccacccccatgattcgattatctcccatagggtccctcccacaacatgtggaaattatgagagtacagttcaagataagatttgggtgggtacacagagccaaaccatatcaaccagtaaagggatttcttgtctttgcacttaaagaataacatagccattaaaaataatgcttacaaatatcatgaaaaacacatgacattatggtaagtgaaagaagtgtaacactgtaacacttgaaagcaggatatggaacgctttacataagatccccaagttagtttttttcttcttctaaagactaggtaggaaaaaagattgaaaagatatcataaaaacattaaccatagttattaacaagtagtgatgttagataacgcatttttctttttcccattttttcatgttatttccatattttgatattagacacatattttacactgaaaaaatgtgtaaagaaaagtcagactgtactgactttaaggccttaattttttaaaaaatttccataggtttttgggaacaggtgttatttggttacacgagtaagttctttagtgatgatttgcgagattttggtgcacccatcacccaagcagtatacactgaacccgatttgtagtcttttatccctcacctccctcccacttttcccctgagtccccaaagtcccttgcattcccctgagtccattgcatcattcttatgcctttacttcctcatagcttagctcccacttatgagtgagaacatgtgatgtttagttttctattcctgagttacttcacttagaataagagtctccagttccatccaggttgctgcaaatgccattaattcagctgagtagtattccagtgtgtgtgtgtgtgtgtgcatatatatatatatatatatatatatatatatatatatatatatatatatatatatcacgatttttttatccactcattgattgatgggcatttgggctggtttcatgtttttgcaatttcaaattttgctgctataaacatgtgtgtgcaagtatctttttcgtataatgacttcttttcctatgggtagaaacccagcagtgggattgctgaatcaaatggcagttctatttttagatctttaaggaatctccacactgttttgcatagtggttgtaccagttctagtttacattcccaccagcagtgtagaagtgttcccttttcatctcatccacaccaacatctatcattttttgattttttgattatggccattcttgcaggagtaaggtggtggtatcacattgtggttttgatttgcatttccctgatcattagtgatgctgagcattttttcatatgtttgttggctatttgtatatcttcttttgagaattgtctattcatgtccttagcccactttttgatgggattgtttttttcttgttaatttgcttgacttccttgtagatatttgtcctttgtcagatgcgtaaatggtgaagactttctcccactctgtgggtcgtcttttactctgctggctaacttttcctttttttgttcagaagctctttagtttaattaagtcccacctgtttatctttgtttttgttgcatttgcttttgggttcttggtcatgaagcctttgcctaagccaatgtctagaagggtttttccaatgttatcttctagaatttttatagtttcatgtcttagatttaagtccttgatccatcttggttgatttttgtataaagtgagagataaggattcagtttgtggcttgccaattatcccagcatcatttgttgaatatggtatcctttccccacttttatgtttttgttttctttgttgaagatcagttcactgtacatatttggctttacttctgggttcgctattatattctgttggtctatgtgccagtttttatatcagtaccatgctgttttgatgatgatggtcttatagtatattttgaagccagttaatgtgatgcctccagatttgttctttttacttagtcttactttggctatgcaggctctttcttggtcccacatacattttaggattgttttttctagttctgtgaagaatgctggtggtattttgatgtgaattgcattgaatttgtagattcctttttggcagtatggtcattttcacaatattgagtctacccatccatgcgcatggaatgtttttctatttgtttgtgtcatctatgatttctttcagcagtgttttgtagtgttccttgtagaggtctttcacctccttggttaggtatattcctaagtattttattttatttttttgcagctattgtagaaagaattgaattattgatttgattctcagcttggtttgtgttggtgtatagcagagctactgatttgtatacattaatcttgcatcctgaaattttgttgaattcatttatcagttttaggagctttctggaggagtctttagggttttctagatatacaaacatatcatatgcaaacagtcaatttgacatcctctttactgatttggatgccctttatttctttctcttgcctgatggctctgacaaggacttccagtactatgttgaatagatgtggtgagagtgagcatccttgtattgttccaattctgaaagggaatgcttttaccttttccctattcagtgttatgctggctgtggatttgtcatagatgacttttattacactgaggtttgtcccttgtttatcatttttgctgaggattttaatcataaaaggatgctagatttttttctgcatttgttgagatgatcaggtgatttttgtttttaattctttttatgtggtgtatcacatttattgacttgtatatgttaaaccatccttgcatccctgctatgaaactcacttgatcatggtggattatctttttgatatgctgttggattcagttagctagtattttgtcaaggatttttgcttctatattcaccagggatattggtctgtagttttctttttgttttttttgttatgtcctttcctggttttggtattaaggttatactggcttcatataatgatttagggaggataccctctttctctatcttgtggaatagtgtcaataggattgttaccaatccttctttgaatgtctgatagaattcagctgtgaatccatcttgtcctggacattttatggttggtaatttttttttttttttttgagacggagtcttgctctgtcacccaggctagagtgcagtggcatgatctcggctcactgaaacctctgcctcccggattcaagtgattttcctgcctcagcctcccaaatagctgggattataggcaccagccaccacgcctggctaatttttgtacttttagtagagacgggattttaccatcttggctaggctgctcttgaactcctgacctcgtgatccacctgccctggcctcccaaagtacagggattacaggcgtgagccactgtgcccggctggtttttctttttcctagagtgagaggtcattatcttccatagagtattcagtcagtaacaaccagaattgaaggttctgcaacattactgcccccactgccatttttcctggttgaataaatcatggtcatgacaattcatctggctttactttgatcttcatctttattcaatcatgctataatgttttcctgatttttctgcaatttggggaggaaacagtggccacgaggaaggggtgggaggtagacaaggtcagggtgggaggtagacaaggtcagggtgggaagatagtattgaactttacttcttgaaatgtgaaaaaaaaaatgtttgactacaaggccatatgccccaacactggattaatatcatgttagcagaagatgtctagtgttgactttggctctgattacttcagttaactgtttccttgaatgaaatatggaaggcagtcccaatgacttactgtataatcctataatttttatttaagttactggtacaaaagtatagatcatttgtattactgacagttttgcttaatttattctactaataacatttgattggtacttatactttgaatggtagaatcaggatctaggatgataatgaaagttggtattattaggttgatgtgaacaatatgaaatttaatgaagataaatgtaagaactggcccttaggtccaacaaagcaaagtaaaaacaggtgagagaagatatacatttggtttagcatatagatcaaacactctgaggctttggcttatggtaagcttcaagagagacaacactttggcgtgggtgctcagagaaactctgtaatcacaggcttattaacagaacaatagaataatgatgcaaacagtgccagactctttgcattgatcagatcacctctggaatattgttttaagttctaggtgccttaaagcatatggatatatattcatattagattgctaagagttgaagtcatgtcatagagaaaacaaacaaagaatgtttgctggggtgagggtggggtagcattatagctatctttaaatattaaatgattttccaagtggaatgtgaccaaggactggtatacaagatataaggttagggtgaatgaatgataactaagccagagcatattttttttaacatgaggaagatatttttaacagacagcgctctttcaagatgtcatgggctgcctcattaggaggcaagtgtttagctctaaaggcattcaagaagatgctggaggccgggcgcggtggctcacgcctgtaatcccagcactttgggaggccgaggcgggtggatcatgaggtcaggagatcgagaccatcctggctaacaaggtgaaaccccgtctctactaaaaatacaaaaaattagccgggcgcggtggcgggcgcctgtagtcccagctactcgggaggctgaggcaggagaatggcgtgaacccgggaagcggagcttgcagtgagccgagattgcgccactgcagtccgcagtccggcctgggcgacagagcaagactccgtctcaaaaaaaaaaaaaaaaaaaaaaaagaagatgctggaaaagcaaatgtcagaaaagaaatgtcagaaacaaatacaagttatctcattcctgagaaaactataactttcctggtagatccacaactttggatagggatggtgaaaggtgccaataattttgcagatggtctcaaaggcagcaaaggcagatctgcttttatgggtgtttttaagctgttcagtctacttaatttgctactgtaaatgttttgcatatttaaaaattgggcttaaatttttttaaaaataactttggctcaccctaatgaataactcccagaattaaaaaattgaatagcaaaaacaaagtagttgttgcagagaaccatagtcgtgggaaccatagttgtccttgcttttatttattagtcacataacctttggtgtatcacacctactaaagtccatgaaattaatgtctttatggtattttgaatgagagtggttgctctccggtgtcgtttgattctttctcctctttgaggagtccacagtatagccacactttggagaaaagtatcaaaaagtggtttgtcttttgactttttgacttctccttgtccacttccagccgcaatcatctccctcctaccagactctgggacgtgaatgtgtaattacagcccattgtctgtgcagcaattatagcctaatttgacttgttgcacagaaagatgacaaaagtgctggctgtcaggcagggtcagaggtcagccattaccccacggactacaggcagcagcctcatcaggattctgtggaaggctcgtctctgggcaggacgggtctgcagctgtctgtgcgtctttgcagatgactctgggtgaaaacatggactgttttcaagatagatgatcccagcgtgcagtttggcttcttgctttcttatcaaagatgtcaaaattgttctgcagtgaatgaagctatttcttgtgccttctatataaattttgagtgggacatgtacataacccagctttaagatattttatcaactttctagaaataaagttaagattatgaaatggtatttaaaaggaatgttaaatcagtatgctacattagtatgaaaactcctgtgtgttaaataggataataacttggatgcaattaaatgaattgtatccagatagaaagtcctagagacactataaataagaatcataaaatcacaaagtaaaactaaaaaagcatatcctgtatcagttaacctagtccttgtaggtaataaataaatattccttaaataatttttcttatgttttgtctattctacatttaagtctctgatagtaggcaaattcagatctatttcaagagagagaacattttactgttattgaaagattctttaatcccattttcaaatatttgatatatttaacataattgatcttctccaaatttagacagacatactggtcaaactcatagtcatttcaatgaatgaaagtaatagaaattataattgagagaaaatatgctaagtgacagtgccaatattctagaaatcagaaacaaaatacaaaatgggcttgagaaaattggttcatttaaaaaaatatatttagtaagggccaatctaaggtggatgggggcaaaaaaagtttaaacacaaatccagttaggtacaataaaaaatacattttgatgccaatgcacttaataggcagtataaataaaatgcttttatgaaatatagcaatgtgatattgtaatctaaccaaatatgttaggtaccaggaagcattccttactattttattctataaaagaagaggattgtattcgtttctactactctatttcattattttattcttgtcagaaagctgtagtgcacttaagagtttagggcaggattttaagccctagaaagccaggtaataatcaaagaaaagtcatttttaggttcccaggctgaggtaaaacatagaagtcaggaaatggtttaataatgagtaagcaaacaggaagtgaaagcagtgagccacacaggccagctgacttagatgatcatggcaggctcagagacgaaggaagtgagaattcagctgtcaaaccaagagtgttggcaccagagattacagtgggtgtgtgggaaacctatcatccaattctttgcctgcaacaagggcatttgagattcatgaccatttcaaagatctggttgtatggcctaattcacctgatcctttgggtgaatgctaagagaactgccaccatttccattataacaaaagtactctttattgaggaattgttatatagtgggcgtagtataggtaaacacttactcacttattcccttattctatatatgagtactgagcttagaatgtgccaattactgtgatactgactaggatacaacagcaagtgaaaacaaatatggtccttgctctcacagctaggatgaggtagatattaattatataatgtatataacttaaataaatataaatacacatgtaatttaaaatgtgttaagtactattgacaatagaaaggggtacttggaatataggtagatgaagaataaaatttgatttaacgttcataatctagtagaagtctccttttacagagaaataggcagaggcgtggagaagctaattcccaaagtcacaggcctacaagaggagagctgaactcttctgtatagtcttcctggtcacatactaactaaaacaagactcacacaaatgtagaactgaaacagaaacttagatcttgtataaattaattcattgatttattcaaataatatttgttgagtggcagctctaggtacaggggacatcatagaaaaaggccctcttttttgtgcaaataagacttatattttagtgggtaaaaatagatgaacaaactggctacctaaatatcagtgataaaagaatagcaaagaaacagacttgtgtgatggacaatgacagaatggctcatttttcttagcagtaccaggaaaggcctccctgaaaccagaacaggaagaagcaggcccttcagagggctcagggaagagtctttcagctagagggaattgcttggacaaaggccctgagaagggaatagcttgcatgtttgagagacagaaagaatctccgggtggcaagagtatcaggaagagacacgtaggatgagtctgaagagacgttcagggtccagattacaaaggaccttgtgggtcaggggtttagattttatttcagttgaatgagaagtgtggggaaggtcattaaaggagacaaggtgaagaagatgggatatgatttaagtttgttgttgttgttgtttttgacggagtttctctcttgttgcccaggctggagtgcagtggtgcaatcttggctcactgcaacctccacctcctgagttcgagcgattctcctgccttagtctcctaggtagctgggattacaagcacacgccaccatgcccagctaattttagtattcttagtagagacagagtttcaccatgttggccaggctggtctcgaactcctgacctcaggtgatccacccaccttggcctcccaaaatgctgggattacaggcgtgagccaccacacctggctgatttgagttttaaatgatcactctgactgttatgaagaggatggattaaaggaggctaccatgggtaaagggagtacccagaggggcgctctcatatgcctcacaggtaagagaggatggtggcactgatgaggcagcaatagtggaactggcaagaagtgaatgtcttaaagacctttttattaaagaaaatgtcaaatgcatacaaatttagaaaaaaatcgtaaaataaactctgacacacccatcacccacatttgaccattatcaactcgttgccagttttgtttcttatatagctcaccaacttttccagattattttgcagcaaatataaaatgttatatcatttcatccataaatattacaatataaatgtttaatagacaaggatttatattttgaatacaatactaatttatgcctaaacatggacaataatccttacctttttttcagtccttctgttagattttaatcataacaacttttatcaagtacaactttactgctaatgtgtctaattttatgtatgtatgtttttttattgatacataatagatgtacatattttaagggtaaatgtgatattttgatacattcatattatgtctaaaggtcaaatcacggtaattggaatgcacctcaccttaaatatttatcttttatttatgctagtaagatatgaattgttctatcctctcttcatctgctattccccctcccctagtgttatcaaatatcctgtcagtgttcaaatttctttgtcttatgactttttaatgatttatttgagtcaaggtccttatgttcatatattgcatttggttgatgtgacatttatgtctctcttgttattttcttttccttgtaacttattcattaaagaatttgtgtggcttcattaagagtgtttgtcaatttggacttacctaattgcatcataagggtgtcatttcatgtgttcctctatcccctgtgtcttctgtaacaagttagagctaaacgtttaattggcttcaggtttattttttttttcttttctttgccaaatgtccttccatcaggaggtacacaatatctgagtgtctctttttgggatgttaacaattgttgataatcatcactcagatctctaaattagcagttgcaaaatagtgataatgtaattctattattgagaagtagaaatatggttttgaaacatattttagagatagcatagataagacttgctgatggaattctgatgagaggaagagaaagacagaaattgagaatgactcatgcttttggcttaaaaagttaggttgatggcattgccaattactggtttggagaaggctgagagcagctttagggtatgtggaaaataagagtgaaggattatataccttataaatatccaggtggacatcttaagaaggtggaatagaattcagaaaaggaatcagaactatatagtatagtcacagtatatacttgtatttaaaactgggggtcaggttgagattacctagaaggaggtgtttagaaagagaagaaaagaagttttgaatacttataaggaattttgaccaattgatccctaagtagaaccatgctaggaattgaacagaaaggtcaacttgtcccaggaagcttctccaggtacaacagtataaatccaagagtaggagtttccctgtatgatacagaggagaaacactatgcttgctttcggacaagtagtgctaatctacataaggcatacccctgtaccttgggcatcaggaagaatttctcccttgtcctcaaggtgatatccactagaaagcactacagtgggcggagttacaaaccctacctctactgtgctaagtggaattctatcatggctcccatggcccttgtcacgtggtgttactcctgtgattaagttatgctatgtggcaaaaggcattttgcagacgtaaggttactggtctgttgacattaaaataagagattactgggtgtgcctaacctaatcacatgagttctttgaaagcagagagttttctcctggtggcagaggaggaagtcagagagattccaaatgtgaggatttgatgcactattgctggcttgaagatggagggaggcacatggcaaagaaaacaggccagcaaggaaatggggatgtcagtcctacaagcacaagggactgaatttgtcgaacaccttgaatgcgtttggaagtgtgttgttctccagagcttccagataacaggacagcttgcctgataccttaattttggtcatgtgagtctctaagcagagaacccagttaaatctctccctccttctgacctacagaactatgagataatgaatgggtagtggtgtgagccaatacgctgtggtaagttgtaactcattgttagaaaactaatgtgcctatgacatgccagacactgtgaccggctgctaggaggtatacaaagataatgatgcaaaaacctggctttcagttattcatccatgtaaagacaagaggtggaactgtcttgtcttgagagttaaacgagatcttttcttctgtgtgaaaacaagcatcttcagccctagttcctactgtttctcttcccctgtaataagacagcacacaccgggaagctacatgactaactgacacagagcatgtaaatttgttgtctgtatcagtacagaatcattgaagacttaagctggaatgttatataatgaataatatctaatatttgctcaaattcattattacaaaaaaatcccaaatctacaattaacacaaaataagtacaatatcatgcagttatgagatattggtgtcctcctcctaatgcacaaatacaagtgtgagctgagaagatatacctgcctgggttataattagtatttaattgatcatagtgcacctgggttgtggtaaagttcttgcagcactgttttaagtcagtgaatgtgtgtggttttaaattattttttaaaaagccagtgtagaactaggaacattctaatcaatgacatcattttgataaggaatatatactatatagtaattggataaattttatggaatgaatgttccaaaagaagcagatttggcagtgcatgttcacccactgggtgtctctaatatgttagaatttggtgtgtaacacatttgagtggggagtttaagtactttcaacatccctttctggaggattttttgaaaactaaattctttgcagtgcactatcagatcatcaagaagtgacacaaacttgttactggtaaagtcacatcctttaactacacattataaaaaaaatatgctcgtggtctctctctctctacccctctctctctgtctctttctctctctctctttctctctttgcagtagagatggcaactatctaccaaatatttgtgcgtcccctttcaaacctttcactgagaggcagctgcctaggccaggactgcatttcccaacaacccttacagtcaagtgtggctgtgtaccttgttctcacttataggcagtgtatgttctctagtttcttttcttcatctgctagccataggcagaggattcttaggctctagcctgagttccaaaataaccccatggaagatggtaggctgaccaggaacacatacattggacaataacaaagggtcaagtaaatttgattgtgttaaactaagagatgtgcgtgtgtgtgtgtgtgtgtgtgtgtgtaaagtataaaatgtaatcattctgaacaattgcttataatctttataatctggacatttcatacatctgattaaaatcctcttatcaggcatcaagatgtcactagtatattaaacccgtgttataaacagaaagtgtaatgaaagtcatattcagttttgctttttattttgaaaaaatgaagcagatctttagttgcagtgtgtagaccattgcttgtatgtattcttttatcattaaaaaacataaccagataattattttagctctagtaaagaatttctgcttccataatttatctgttgttgatgtcataacacataaatttcaatcttctttaataaatatttggtcccccaaacaaaaataatataataaaaaattcaacaaaaatttgtagtgaacaagtaatgcttccttcttaattaatttttaaaaaatcaataagcatgcattgcttaaatggaaaaagtcaagaattttctttaactgtattgaaaggtccaaaagttataaaataagccctgtaattaatctttattaatgaatgaatataaaacaaaatagtttgtgttttctttactaaaggccacttctttaccatataccactcagaaatatgaaatgatataagaaacttttcagagaactcataagactacatattaatgtgaaagaagtttaagaatcagaaaaattgaagtgggatagtctgataaattcaaatatattttcttatataagaatgtcaatggataaaagccgataataacaatgttttactgttacttaatttgcctttgagttttatgtcctgattcattatagccttgtctggaaggggaggtattgctttcacatggtttgaaaactaaattctttgtgatgtagagggtaaaacaggcaagtaacaactaaagtagcaattataatgcagtatgatgtagcccactatagagagcaaaaacaatgataaggaagcatgtaatggaagaagcaagtaacccagactgagaggtcagaaactacgtttgtattaaagcccaggtgctgatgaaaaggtggccacgtgcagagtcaaggaaggagttttctaggatgtttcaacgtggaacatccaagctacaatgcatgaagactaaagcaattccatcttggatgcaaatctgccatgttgacttctgattaaccttgattctgagaatgcctctcagatttctacttcatctactgtcactgtaaattctgccctgaggtcaaaacaaccttgaccatacatcctgacctttggcagattcacatagcattcttgcctttcattgaggggtccagttcaattgtcctacacattccttccctatggtttataagccctgagcatatgaggtaacagtgagaggatccaccatcttgtctcatggtcaactgagatgcagacatggcttctgttcacatgtccctattaaatatttctttctaagaaactgtatctgtcagcccttttcttcagtgtctcagcatcctaggctgttggaggtaggtttgtgtagaccttctcaccgctggaacaaggtgtgaacaggatgttagttcacacagccttataagtcatttgaagagctttgagcttcatcttaggagcactggaaagctaataaagggttttaagcaggatagagacacagtattgtgctgcaggatgtttacttgtgtaacagagtcgggaaagaagagatgggctgtcaggttaccagtgttggaacgaatccagggaagagattatggtggccaaactagggtagtggccatgggtgtgaaagaagcagattcaagagacacataagggtgtccattggatttagtgactttagagaggagaggcaggaggtgagggcttcttttactttctaatcactttttgagtgggtttctacttaacttttgaggtcaggttactagcccctcgtgtgatctcaaattgaggattttagtcctatctcagacccaaatgagaagcaaaaagccatcaaagcctctcaatgtggtctaacatctaatctctccccttcaacccaggagccaggagaccatcccaagtttgtatttcaaatagttctattttctacagtcaatgcttgttcctcattcctgctatgtaccagaaacttaggagttactcataatttgagatggtgggttttgatgtattctgacacatgaaggttttgtgctattttttccctgctcccttcagatttactctgtggccctccgagacttcgtgtaacagcaactgcattttaatgcaatggcagctatggaaaacacaaaactatcagtcattgtcaaatactccataaatggagacagagaaggggttcagttctctgtgtaacaaggacagaggagaaaggtcagtgatatatcatgtggtataggattttcccttaagcaatcttccgctaagacttgctcacagtgtggaagcttttgtctgcccagagactgaattctaaaaccactcctcaacttaaagttccaaatattcaacgctctgtatagcattggagaaagtgtagaagacgctgcaaatgcatttagggaaaaaattaatttttgccattcgtgaagtccaggaactaatattaacagttgtttaacttatgaaaaattaattagatgacttataaattatgtatgtgggaaaaagaaaatctgtcagtgggtggtttgaggattcagaagagcacttaagttgataacaaaaggtattttgtgcagcaggtcacattggggtaggcttttattcttcttttgtgcctgaaaatggtgaatacagaattgttcttatgtaactccctggtagtgagggaactagtcattcccataacacatttatcattatgtgtgtgtctgctatttagaagtatagaagagagtagacaaaaatttaatgagaaagtcagagaactgaaaagtcgctagaacagctagaatatctgaatgctgaacccgtctgcctagcaacatggcacaacctcataatgagcccttctcccagatctcttgagaaaagaataaacacagcaaccctggaagtcaaactcatacatgtgatatagaaattaaacaacagatctaattctgaaacaagtttagatttatctgtattttaaaaaatattgtagagcaatgaaatatattttcttaatctgacttttaaaggaatatttaatttatggtacttttttctggttaattttatcttttccataccaagtaatataggcagttgcaacatccatgaagagttgttaattggagcacaaggtactagaaatgttcaatctcactttgaaagacacattacaaatatgaatatcaattaatatgcctttaaaaaagttatataaatctatttttgggaaaatgtttattttgaataattaaaaacaaaggtgatttgaactcaaaataatttattctagtttaaattttataatgaaaagaaaaataacgatgatttaggaaacagctattctgagttaaccatatatttatcttcactttcaacctttgtaggcataattggagtctctagtataaatcaaataacaatcttcaattaatatatcatagatgattaagcattgtatgaaagaaatcaaattctgatactctctgattttctacagctgtttcccttttactcttttccttaagcttcttaaagaagagatatgttgttttctgtatttaaaaaaaatagtgcaattaacactaagcagcagtgtctcaaataaataggaagacattgataaatttggccagaattacaaagacttctaaaagaaaagtattaatatacctataggatggtctaaaattcagagaatacttttctccacatactgaataatcaggtagtcatttataattccaggtgggtgtggcttccttcattttagggaagactgactaagggcttcactgtagtattgtagtattccactggttttcaaggtaatattacccttgagattttatcttatacttaggattctacagaaaaaaaattatgcgtgaaaatgttaactgcaactttatggtcaactctaaggtcctcttttaatccacagatgcccaaatactaacttaaaactgagtgaatgaaacatgtctcattatattctaggcatctgcagtgtcaaatctacagagacaagtgcacctggagacaaatgaccagactaccataaaacagaagcttaattatgttcacttacattttcaaattattcccaacaaattaccctggtaggtgacacatccatcaagccaagactctaatttcacattcacagtaatatgtttctgtaaactactgtaataaggttttaactaaattttccccttgaccttactgtgctgaaatattgcaggctgtgtgttttccagtttctccaattaatttctgaccttggtgctgcctgggcacaatgaggcaagtgaagggtggagatcagatttaattttgaatttcctgactgctgctggtctgtatctcaacttgaacattacttaaacatgttatttttggtcaatgacttttttatgcagcacactgggcagatataattaagcaggctaagttttgttctcagctgtcctctaagttcttgcatgggaacttggagtctcaacaggaaacacctgtatggtggttgtataccaagcattcccagagaattaatatataacattgttcctgagcttctcaagctattccccaaatagaaatgcccagctgtatttgaaggctgtattttcaattactagtgaaaatgcaagcttttaacttaaaagtaaactttattataaagatctatttggcttagctatattaagggtcagcctcatcattcgtttatttcgtcattcaatattagactttttaaaattcaaacaacctttattgaatgcctacactatgtaaggactgtgaaagtataagagaaatcagacttaggccaggcgcggtggctcacgcctgtaatcccagcactttgggaggccaaggcaggtggatcacctgaggtcaggagttccagaccagcctggaactggtctggaaaccatagtgaaaccccatctctactaaaaatacaaaatttagctgggcatggtggtgggtgcctgtaatcccagctacttgagcgactgaggcaggagaatcgcttgaacctaggaggcggaggttgcagtgagccgagatcatatcactgcctggcctgggtgatagagcaagattttgtctcaaaaaaaaaaaaaaaaaaaaggaaaaaaatatgtgtatatatatgtatacatgtatttggtggtgttcttgctgttgttgttggttctgtctctccggtgggccctgtctaatacattgggggcctttgtcagtttcagccccagctaaggatgggaaaataggttcctcccaagaacttgcagttacaatcttctctcattcagctatagaatttgaatttactacaacagagatgtccagatgacatctagttaagaaattgaagttatcagggatctgttctgcctccatggaatataacagaagcaagcccaattctagtcaatgatgatacatgttcccccagacctcacagtatccctacagataaagcatcaactcaataaaaaattaggatttgtattcaaaacatacacataactactaaaattcaataataattttaaaaaactatataagttgaaaaattggcaaaaaaaaatctgaatagacacctcgccaaagaagatataccgatggcaaagaagctattaagatatgatgaatattatgtcattaaggaattgcaaagtaaaacaatgatgcaacaccactacatgcatattataatggtgaaaatccaaacactgctaacatcaaatgctgatgaagatgtggcacaagagaaactgtcattcattgctggcgggaatacaaaatggtacagccaccttggaagacagcttgtcggtttcttacaaaactaaatatagtcttagtgtaagatccagcaatcacatttctaggtatttagccaaataagttgaaaacttatattcatacaaaaatatgcacataaatatttacagaagctttattcataattgccaaagcttggaaggaagcaagatatcctgcaatacgtgaatagataaacaaactgcagtatatccatatcttactgagtaattaccactcatgggtttcaagttacttagtgataagaagatgtgatctggctgggtgccatggctcacacctgtaatcccagaactttgggaggccaaggcagaaggatcgcctgagccccaaaaaaacttgtagataaatgtgcatagtagctttatttaaaatatttaaaaattggaaacaatccaaatatccatcaacaggtgaatggaggagcaaattatgttaaaataaaatactactcaccaacaaaatgaataaacaattgatacatggtacagtatgagtgaatctaaaataattatgccaagtaggggaagccagacaaaaaagaaaatgtgctgtatgattttattaatataaacatattggttaacatgagggctcatttatgtcatcataggctttatgaaaaaacatcaacagcaagaaaaataattatagaatgtcaaaattggagagtaagaaataagatggaataaaaatactataaataaaagaaatgaatataaattaagatcagcatggttgagtatttttttccagtaatgtttagggcattgttatacatggagtaggcaaagagttggatctaactaagtttggagtttggtgaggagagtatgtctaagagcaaagcagcaagtgactgaggatatataataggaagttataagcagagttgaaggaatataagctgaaagcaggaaagaaaaattttgaatggaattagggtcaaagacaaagtagaaaattccagtatagccaaagaattattggaatttgagtactagagacagtgagctagaaaataggaagcattacaattagtcaaaaagtaggatgattacacctgagataatagaaggggtacagttattggaaacatcaatatttaggatattagcctgagagtgggtagctaatgtgggatagagggcaagatcattggagtagagaagtcaaggaactgagaggccaagatgttggaagaacagtccacatagatactgaaattgctaagaacgatgacaatcacataggatagagtgacagtactctgctaaaagaaacttttaacaaatgacaggaatagcccagggaaatgcacagaggcaaatcttaggatagaaagagcttcaaaaatgaggcttttttagggagtaaggaaggtaagcatttggaaatggtaattatcagtaataacgtctcctcatcaccagatttaagacgaggtgactgtgggaggaaaaaatgctccatttgagagagctgccagggaaagaatttcaggggagagacaggtttccctcagataaggaaagtgaagggaacactcacaggacagtttgagcatatagagaatttcgttggttacagatgtgagtaccaagaaatattgacaaaattgtttaggaagaaatcttgtttatgtgtggactatgaatagattttgttctgtaaactgtgtacttaggcagatgtttatgcgtagatggttgttgtggttggcttcccattcaataaagacagcctctttatgctcaatattatcatttacaaacatcaaagatgttcttttttttcccaaccattataatgtgtgtatgtacatatgtatggctaatatcactaaccaggctacaattaactcaatttaagacccatatataaaccacatagagaacagaagtgtcaacacaggcacaacataattggcatatctcagatggagaacaggcattaaccagaacttgtaagaacacttagtaccatagtttcctgtttgtctgcttaaacaacaagcatcttcatacagctctgatatttctcaatatgttgaataggatatgctcattctcattgactagaaggtgcaattcctattttagtgaatcccggttccccattgccctagtttacacaaagcaatgtgcattgcaagtgcagaggaagtttgagggatgaggttgggattgaggttcactctgccaggacaccactcgcttcacttttcccgagatttaaggagggcaaagggagctgccagtgccacgagctagctcccacatcagtagcccacctctcaaactttaagtggcctgaagaaggaaagttaattgctctataattacagccttggctgggtaaactcattttcaggcaggtcatggagacaaagagcttgtgtattgtctttccatgcagtgacattcatagtgggatgattttgtgtgctttgaggatcaagaatcccattatcctgtcctatgtgtggtcaaaaaattcttaatatttttgcattccataacttaaacactagacattatttttctattgaaccctgttatttagcctttgcatagttaagggatctaaaaattgcagtcatcatatgcccaaagttttaatgtgactagatcaagctggcatattaaaaattttaaggaagttattcaaaacatgcatccttttaggaaactttaaaatttaccaaaaaaaaagagttaaagtggaatttattttcttcaaattcctttataatatctttaaaaaacccccaaaaactgatgactcccaaatcccactactctttatagagaaaaaaaaaaatactatttttaaagatttatgctacttttagtttcataatatctctggagactataaattggtgctttctacggaacaatatatcaagcttgttctttaaagtttaaatagctgctaaaactaatattttaaaaaagaatagaatagctatatcatttaattgtctattattctgtcatttaatcaatttatgctttatttttatgattctcatcaaaacaatagcaatgttcaagaatttttagtcaacttcagcttgagcaatagtgtttaaacatgcctattatgcaaattatttctcaacattcttagaaaacatatctgtgttgttattgttttatcatttctatcagtttagatagcagaggtgttagtgaaactcaacacatctttaaaatttttctgagatctaatagctgttcataacagaaatttctctttaggaaaaaaatttcactgatgtttgaagcctaaattcattccatagacaataatcaggagtgtagtatatgtctggcagtctaccaaacaatgagaatgtggatatgagaaacatagagtcctctagagagagagggagggattccaataattcagggaactctcctcaatgagaaagtatgtttaagttaaatttgtaatgttagtttttccaggcagaagaagcagagtgaagagaggacattccaaataaaatgaatggtatgtacgaacgtagtatgtatggagtgatggggtacaagtatagtaattcagtgtggctgacatgtgcttaatagggagaacaatgagggaaggggctcaaagggaagatacctgtcaatcatgagggactctacctgccatgggatttgttatttgtctcttggttatggaaagccgttgaaggatttttttttttttaagcaaaagatggctggactgaatttatattttaaaaattgttttggcaatcatgatcatcctcaagttatcagttgaatgcttgttatatgtattatcatagttaatcttcaaaaacacactgtgaatgaaatactactattattcacattttacaaataaaggagttaaggaatgtgtccaacatcattcatctattaagtgatggcgtgttgggattttaaaccaggccgtttaaatgaagccccctctcttaacttctacatgtcactgcctgagtacattctactgtagtgcagaggataggggatgggcaaagggactattgaaatagagtaggtagaacagtggttgatgagaaacaaataaacttaagaattatttaagagtatagtgtccaaataccttgttttgaattggatccatcagcatttgaactgtctgaaaaatatactgagaaatattttatatttttaattaaaaagtatgattactacattatgatacaatttgtgtgcaagtctcctcgcccattctctggggctacattgtgagtaattcagcttatttgctgtctggttagccgaaggcttattatacaatcaaggcagatcacaacggccagctgcgtggataaaatttctatgagcttgtccaacaggagataatatacagacacactatattgctcaaattttcttttcataaatataatattcatgctttttgttcagcttttatctttgtcatatctttatgtgtttttttcaggaaagaaatatttggtgggtttaataggctgattattttaaatcaaaacctttgttcaacactgtcttgtgataattaaaagaaaaataccggtttgttgtaaagaaagctacatttgtatggtagaaggactttttttctggtttttatagtcaataaacataccggtacatttacatctaaaatactaaatacatacccaagagtgttcaaatatttcatgatatggtttctttctgataattcactatagtatgccctaaataattgtatctggattatcaatagagtcccatctaactcagtaaaaaaggcaatgctctaaccatgttctgtcgggtctttcatgactgatccagctgtttcaatccccctgtcccctgttatctacccaacgtcattttccatccccctcccccatcacttactcttcctggccatattgactgctttccttttcctcaaacatgccaagcactcaaggtctttgcaattgctgccctcatgattgggacacttttccttcagttatccagatggctggctgcctcattttcttcgagcctttgcttaaaatatcgctcgatcagaaaggcctcctaaaccaccctacgtataccacttcttccacaaaactctttctctcttaccctgtttcattttccttcattgcaatatccccaacagatatagtatacatgtatttgtatatttgtttgtctcatagcactaagatgtaatctccattaagtcaatacctaggatataatattcactgactttgaatggaaaaatatgttaataaatgaacaacaggcaattttttccacctaaatgcactgctcctccaaatttgtttaaagtggtttaaagtatttttcaattgctttatcttggcaacatggaaagaatatttagcattatgaatactctatgaagggatcattgcaaatatttaagcttaggtcagtgaggcatagatttaattttgtttcatttttaatataccattcacttctttgaaagcaaaatgtctttttaaagaacaaaaactatattaaatacacactatctaaataaaacataaggatattataggttgtcgtcaaaaacatttttcatattgtcagtacatattttgcacactattgtttattaaatattgagaattttttttggtaaaagctaattaaagaatccaaagaaccaaattaccaaattgatgaagtcagggtgagaggagttaattaaggttttatctattggtgtgtaaacaggtggtcattgcattaacccagacagaaacccagattgaaaaattcaagaaataattaggggaaaggagagtagagatggaaaaatacgttggttttgatatcctgttttacatccaattttagttgtccaataagtagtaatcggaattgtagctctgaatcttagaagtatgttctggaagtaaatattttataacttttagaatgtatacagtcattgaaattatgtggataaggaagattacttagggagggtgtatatgtcaaggtgagaaggtggaaaatattatttcataaatgcttagctcaccaattatttttacacccattacagttatttattattctttactgtctctgcatttatattcctccatttttactgtgtttttaattaatttcttttttctcaataggtgatgctagatgtatttattttatcactttattgaaacaagcgacttttagttttcattaacattttaattgcttttttgttttctatttttttgatttttactctttataatttccttccttctagttttttgaggtttacttcgttcttctttttctagtttcttgagttacatgctatggaaagagaaaatttaaagtgtcatttttttaatgtagttattatatactctatgttctgtgattcagtttttgatttttaaaaattctgtttggctattaggtcatggttgaagccaaatactaagcctctaattagcacttgtcagtgaaaatctttggtagaataaaagattgttgaatatagtgcagtgtgtgtcagttagctattgctatcacagtgctgtataaccagctactcacaaatgccagggacttaagacagccataattaatctcgtagatttgtgggctcactgatgggctcagctgtatggctctgttgatctcaagggggtttggtcttttgtctagggttcagctggaggtgagttgatgtaggttttatgtggctaggatggctgaattcttttgcccaaacaagcatatttttcttgtggcaatggcaaaggcgaatgagagctagctcaataatgcaagcacttttcatgttgttggtcatgtgacacccaataacactccatcgcaagtcaagtcacaagacagaaaccaaagtctagggggtgggaatacataatcctctttagtcagattgcaaacatcccttgtcacagagaatgggtacaggcgtagatggagaacaagagcttttactgaaattaattgaaaacacaatacaactatagatagcttgagtcagtattatttttaaaagcttgatggcaccaggagaagaaagctaaccaatgctcagatgaagtacattttgtgtcaaattttaaaatgctttgaatgttatattttaaaatatgcttgtcatcataagcatcctttgctccttcctttttcagaagccccctgaaacacacacacacacacaaagttgaaccttacttcttgtgaaattaactgttcatttcaaagccgtacttatgaattggtggcgaagcaaacaccatgaaatcagtctctatacttggatgtagacaaatggtattccactgttagaaatatcttagattctgtctccaacattaatattgatcattcgatttttgtttcttgttatttatgtggcgtgttgttttccttctcttctttttaaactttttgagtcatttcattttagaaatgtatttactttttaacagtctcatccaataatctgccttttaatcagaaaatttaatccaccaagttttattgtgcttactcatttgtttggaattctacctactaatgtttctgttttctctttgtttctgatttgcttaattttgatggtttatttgatttttcctttctttcttgctttctattgaattggtaatatttttctcctttattccctctactagtttggaaaccatacattgtatttatattttattatcacatacatatttgactctaactttctataactcagaagttattctatatctccagctgatttatttatttatttatttatttatttatttatttattttgacagagtctgactctgtcacccaggctggagtccagtggggtaatctcagcccactgcaacctccacctcccgggttcaagtgattctccagcctcagcctcccgagtagctgggactacaggtgcacgccaccaagtctggctaatttttatatttttagtagagacagggtttcaccatgttggccaggctggtctcaaactcctgacctcaggtgatctgccggcctcggtgtcccaaaatgctgggattacagacatgagccactgcacccagcctcctgctgattcttaaacaagacaaggtactacattaaaccttcctcctattctgcacccttatctccatgcgtctctgaatatgatgtctgtgtctcttcacacgatttttctctttacccttaataacctttattttttgacgtggtttatttaaacacaggcttatttttatttaaccctcttggtacttgatgttcatggtctaagtttatctttcttcaaatctaaaagttcttatctattcactttctaaatatcatttttctgccattctttctattttctttctttctttttgttttttggagtgccaattagcatgtgttgagtcttctcaaactcttttccatctccattaaccagtttttaatatttttagtctctttatccttctgcaatattctggcagaatgcctcaggattttcctatgttcactagctgtctcaattactaaaaccaattgagaggttttctgttttagttttttatttcatttactgtattatttgttagatttttacttcactatttttttcttttcttttttgctattttatattttctttttttccccccagtggtcttgtactttttatatctctttgaagatccttaacatatatgcttcaaattgattttcatatttctctatcatattttcatattttatctagactgaatttatctcatggctgctgttcctaaattggtattcttcatgaattttggaatatcagtttccagatccatcttgactgaaagcctgtcatggtctgtagtgtggctagggggcctctatctcacatcaatattgtaaatagtgcaatccagatgccaagctattgggtggtgtagtcttcgcctcatttcttggcattatctacttcctcttgtccccctagtgatgcaattgtataatagttctaaccattgattcacatacgtggtgagcaccactgttctgagcttccatcatggcagggagagccccactgaagcacctcatttcaggttgtgaattcttacttagtcctatctccagtggggcactttcagtttttatcatgcactggaaaccaaactgccagtaggctctacttgcttccatttctggaaccagctagccccatctactttgtgtttcgtttctatttctgatcaagaacatggatattttgtctttgagagtggttttatctttctgatttcctgtattttgcttcaattaaaattctgatgggaaatgggtgtgaatttataacacaggaactggatactgttcatttattgataaagtggaaatggcagatatatttcattaagctagtttagtattctggatatcacagttgctagtagtgatgctcatgctactcttacttaggcaagtggttcagtggcccttggatggggaatgaaataagaatttggtgcaattttctctgtataatgaaagtaagacagctaagttactttttgaaatacaaactttgttacatataccttgtcgattccaaatatttgtttgctgaatttaatgacattttatttaattttattttttggaaacctgggcttgatacctcattgtctgccaaagatcagatgtcctcaatgtaacattcagcgagcagaaccaaaatatactttgaatatactttgaaaccttgttataaaagattaatgaactttcattcaatgggtactttttttcttccttcaaattttcacatgactgataacttatcaatgtgtattgtatgttacaaatgaacttgtcagaaaaggaattatagatgtccaggaaccagagataaccttgagactcatttcctatgccccaccctggataatgtacagaatgttcttttcttagggaaaaatgttcattattgtcagaaaatgattattataatacattagtctcagagttattggggttttatatattgtaaggtttattgtgcttttatagtatacaaagatatacaggaatatatgggatacaaccgcaataagtacaacatgagaagttgccattttgctcttgatgttatgagaatatcatgtttgacgacatgcttgtaatggaaatggaagggtcatgattcagataatcttcaaaggggcttgaatggtaaaatatttgataaattcttattgcacttggcaaaaacaaacatcttccacccagaacaatttcatatatactatttaaaaatatctcctgtttttctgaagttgacagttaacattttatgtagcatgtgaaccaacttttcttcaaacaagaattcaagttgttaaacagctgtcgttgtaagaaatttttaccaacaaaatcattggtagaagtaattcatggggataaagtaaggaagaaaaaatttaccaaaactgagactaagttagattagaagactttcatcttattcaatgagtccaatcttgagatgcttataaaaagaaaaaaaaaaatgaggacagtctcaaaacatccgtagcactggacgtgtaatgttaaagagagaattgtgagaccaaggcataaaagaagaagaagaaggaagcctgggatttcagatctcctaaacaccatggctgctccacaatttctgaagaaattgtgagtcctttccacatagcttagttttgtcaactctcaaagctacttttgtataatgcttttcatatgatataggaaaacatcaatcatatatctcaaaaattctggggagagaagaagttggagattatagccagaccaattccttactcttttcccctgtctgatgccaccaggtgctcctagatccaaatgtccccaaaacagcctatgtactttgtgtcctataagctgcccttccattttacatactgattaatacaaaaatgcaaaaatcctgcattgacaagttcagtgcttcaggaccattctatgaaataaaataagagacaaatttacaacttagggcattggaaataggttcttgagaaggttaaaatagaccatgtcaagtcacaggctatgtgggtcaccaccagtaaaaaccaagcagaggtgaggatgtcctagtcttaagtggctgtaattgatgatatttgccttgaaatcaataggtccattttatgtatattcacctgtaccaaccgcaaccaaaaatgtggaaggaaaaataactaatagacttttcttgaagggtgtggtgagaaggaattacagtgtttaaattgaaatgagatgaaaatcagtgttctcctacctgaatgggaaaggttttcaaataaatttggtgactcaaaaaataaacatttttgttagacataggttaactcttagataacaaataaaatcactttctaatagtacagatttttaaaaactgtcagtattcatgaatatttgcatgaaatttttgtttgtcctacttgaatgactacttggaaggcacctacagaagcgtccaccaaaagctcacagatgctgccattcacaagtagctttgaaaataaacatgaaataacaattacagtttgggctctgttaattagaaagttggtgggcttattttaataggccaaggatgctgaatatgtcaaagcacagtattaaaaacttttaaatatcttttactatatataacttactatgcttaattaactacctctttctccttttggggggcctcttatgcccaagatactgtacacaaaggagtacaatgtcatgatcaaaaacctagcctccatagacaaaccactctgcttgtgtgaccttcagcaaggtacttaacctctctgaacctcagtttcttcatctgtaaaatgaggataacagtacctatttaaagagttgttgttaatattcaaagttttaatgtacttaaaaatagacttaaaattagctgtaagaggactggcagatataagctttaaataaataagtgctacaaagcatacagtaattgcatttttctcttcatatatggttttttagtttttaatgaatgttttcatatatactattaattataaaattcctgtgaaatattcattgttaccctatttttcgcatatgggaactgagcaaaaggggttgttcaaggccactccaccaataagagccaaatttggaaggagagtgcaggtctcacagctgctgctccaggatgcaacccgttgtgttgcactgtcccttgataattggattttaatcaggtctgtggataagtctcacacacacacacatacacacacacatgcaaaacagaactttggataagatacaagaaaaatgatctcaccaagaatgtactttagtgagaggaagcagttacttcaacatagacaaaggcgaacagcagacaaggaggaagcaattaaatagaaggagtccactagtttgtttcattttatttatcattatattgagcatagtgtcattcagaggctaccagaaagacccccacctttgagcctatgctaaggggatcctggaagccttcgccagggtggctgagccactgctgtgaggtgagcagagcctcagaccctgacaccctcagggagaaagtaagggagtgactgtcaataattaaaccatctgtaaccctttatattgttttggttctcagaaacaaatcaaggacaccacacatagaatgtaaattggcctttgtagtcttgccccctggtataattagcagatgctctttcttaatgcaggccagttcaggggaaatctatttgcataatgaaacacactatttccatgtacactgaaactcaacttcttcaagtttctacgttcttcttgttgggactacttggaaaagaagtattttattattgtgcatccccagaatagaatctctagacctgggaatccccaaaatatagtagggataaagaaccatttttaaaaatatcagcaaatgaaagagaaatgtattaagtgttgtaagcgatcctaaaggatagctaagaatcttaaaggattctttgctttgatatgcaatcatggaacactgatagcatgagtgaaaaaatgtaactttaataaatatggtgtctttggaagaacaaatgtttcaaaatgaggcatatagaggagaggggaagagagagagaaagagagaagaaatattaaaaatattttcttagtagataaagggaggtcagagaagtgattttcaggtagaagagataaaaagagatgagggcttagggaaccataaaggaggaaatggtataagaatgagggcgttgtcgcaaagacttgtcaaggtctggaaaatgtttcagtgtaactatagaagagagagatgttaaattttgcttgactacctaaatcttctcttgcttcatctgccaaagtacgcttcactggaaaagaagggagacctttctagcaggtcttctacaggatttctttgcaataaaaatatacagaagtagcacacatgtccacctgtaagctggcaaattgccaattagtagaaagtctataagtaaatttagctaaatataaaagagtacaacttaaagtacaatacattcaagttaagaatataaaactaatatattgtttaatagtagctatgatgagattatcatagcccaggtggtactattgaaatattgagagtaagatgtgtgtccatgtttaatgttgtatacagtaggatttttattaaaaacaaaaaaactaaaaaacctgtaggcaacttaaattttaaaacatagataaaatagatacatatattttttattattattatcctttaagttctagggtacatgtgcacaacgtgcaggtttgtcatgtatgtatacatgagccatgttggtgtgctgcacccattaactcatcatttacattaggtatatctcctaatgctatccctcccccctcccccaaccccaggacaggccctggtgtgtgatgttccccaccctgtgtccaggtgttctcattgttcaattcccacctataagtgagaacatgcagtgtttggttttctgtccttgtgatagttggctcagaatgatggtttctagcttcatccatgtccctacaaaggacatgaactcatcctttttaatggctgcataatattccacagtgtatatgtgccacattttcttaatccaatctatcattgatggacatttgggttggttccaagtctttgctattgtggatagtgctgcaataaacatatgtttgtatgtgtctttatagcagcatgatttataatcgtttgggtatatacccagtaacgggatggctgggtcaaatggcatttctagttctagatccttgaggaattgccacactgtcttccacaatggttgaactagtttacagtcccaccaacagtgtaaaagtgttcctatttctccatatcctctccagcaccagttgtttcctgactttttattgatcgccattctaactggtgtgagatgatatctcattgtggttttgatttgcatttctctgatggccagtgatgatgagcaatttttcatgtgtctattggctgcataaatgtcttattttgagaagtgtctgttcatatccttcacccactttttaatgggtttgtttgattttttcttgtaaatttgtttaagttctttgtagattctggatattagccctttgtcagatgggtagattgtaaaaattttcacccattctgtactttgcctattcactctgatggtagtttcttttgctgtgcagaagctctttagtttaattagatcccatttgtcaattttggcttttgttgccattgcttttggtgttttagtcatgaagtccttacccatgcctatggcctgaatggtattgcctaggttttcttctagggtttttatggttttaggtttaacatttaagtcttgaatccatcttgaattaatttttgtgtaaggtgtaaggaagagatccagtttcagctttctacatatggttagccagttttcccagcaccatttattaaacaaggaatcctttccccatttcttgtttttgtcaggtttgtcaaagatcagatggttgtagatgtgtggtatcatttctgagggctctattctgttccattggtctacatgtctgttttggtaccagtaccacgttgttttggttactgtagacttgtagtgtagtttgaagtcaggtagcgtgatgcttccagctttgttcttttggcttaggattttcttggcaatgcgggctcttttttggttccatttgaactttaaagtagttttttccaattctgtgaagaaagtcattggtaagttgatggggatggtgttgaatctataaattaccttgggcactatggccattttcacaatattgattcttcctatccatgaacatggaatgttcttccatttgtttgtgtcctcttttctttcgttgagcagtggtttgtagttctccttgaagaggtcctcacatcccttgtaagttggattcctaggtattttattctctttgaagcaattgtgaatgggagttcactcatgatttggctctctgtttgtctgttattggtgtataggaatgcttgtgatttttgcacattgattttgtatcctgagactttgctgaagtttcttatcagcttaagaagattttgggctgagatgatggggttttctaaatatacaattatgtcatctgcaaacagggacaatttgactttctcttttcctaattgaataccctttatttctttctctttcctgattgccctggccagaacttccaacactatgttgaataggagtggtgagagagggcatccctgtcttatgccagttttcaagaaaattttgtataaaaatactgcttactcaaattggccccagtagagagaatatctaaagacagcaattgccatagaagaaaaggggaagcagctaacaagctccatcacaataaaagctttagactttgatggcttcacaaacttcttacttcattctctaaagtgcacgttaaacatcatataatctcaatgcaccttaagtctttccagtccaggggaaaagaggttaaacttttatttttataaaatcagcaaaatattttcttctataacctgacagattcaatgaaaaaagaaaactgcagaccgatcccatttataaatatctgcattaaaatcttagatcaattactagcaaatagatttatttaaaaactctatacattatgaccaagtaagctttattctaggaattgaagagtcgttaaatatcaggaagtcccattaatgaaatctaacacattagagttaagataaaacacctcatgcttatatctgcttatatagacacagaaaaggcatttgacaaaattcaaaatctatcatgttttaaaaaagtaaaaggatcgaataaggttggaattgatggattaagtccttaattcagcagtatatgttatataacttctattctaataaccatcactttatttcacaggggaatatttcttgcaaaatttataacaagaccagatatgtgtttacttatatcatagataaaaagtcaatgtctttttatataaatagcttctaaaatacagaagaggccagtaatcctatagaaaatgacctgattctaagctagtttgtcattaaaataataatagattaaaataaaatgattttctgtaattctaaaatgagctatagaatatgagcagagtgaattgataagtttaaatatttgtgaataatgtgaaaaaaatgcttagtctcactcacaataagcaaaatacagattaagaacatgattattccagtctagccaacatggtgaaaccctgtctctactaaaaattagccgggcctgcgggcatgtgcctgtaagcccagctactcgggaggctgaggcaggggaattgctggaaccagggaggtggaggaggttgcagtgagccgagattgcgccactgcactcaaaattatgatccaatttctgatttatcaatttgaaagatttccctaaatttgacaagtactctgtttgagagattatgagtgaacatgcaattatatttataactgaagagagcgcaaaaatataaaacccaatggaaggaaatttagcaatatctagaataattgcatataaatttattctctgaccaagtaataccaattctaggaatcaataaaaaataaaaggcttatgctcaaagctgtttgatacaacactatttcaaaagcaaaaagctaaagagaaaaaattctatatgtaggggactgctggaataaaatatagtggacccaagcaatgaaataccatgcggctataaaaaggaatgaggggccaggtgccatggctcatgtcactaatctgagcattttagaaggctgatgtgggaggatcacttgaggataggagttcaagaccagcctgggcaacaaagtgaggctctatgtctacaataaaaaaagtattaaaatgaaaaaaatgggcatggttgcatgcacctctagatctagctacttgggtggctgaggtgggaggattgctggaacccaggagttcaaggttacagtgagctatgatcatgccactgcactccaacctgggagacaggacgagactccattgttaactgaaaaaaattaaaaagtaaaataaaggaatgaggaatatctctatatactgccatgaagtttcccaataatatattaagtatctgtcacacacagacaggtttagagatttgccagtttggtttggagcaggaaggtagacagaaaggaagatccacagaataaaagagcacttgatatggtagatggacgatttagaactaacagtatttgattaatatatatggcaagagcaagaaaaagtctgaagcacaaaagcaaatagaatcatagtaactttctgactgtttaatcaattattgtatttacatagacttattaatgtaaggcttaactgtttaatgagatatgatgatatatctaaaatgggaaggcaggatatagtgcaaggagggtaagtccttttctcatctaaaggtaagtcaatacatgatgtctgaaactaaccaatcaagaaatagctacataagcaagtactatggaaatgtagaggcaactacgaaaacagaaacctttgcttctattgatttgggttgagttacatatgcttttcagcaccatgtaaatttttccaaaaaatcaagtgaaagtattacatggattaaaaagatagaaaaacagtacttttttttaaaagatgttcagaaacattttcctaagttcatttaaaatgaagtgcactaggctacagtggtatctgactgggcagaaaatagagaaagagacagactccaaaaagacctgaagtgacgtcagttgagcctggagaccatcaccagagctagtcctaagggtgagtccacaatgagtgaaagggagagggggagctttctgtcagtttaaactacagcaacagcatggagattctccattagtcatttttttcttgctctccagtttttgatggttcagatgtctctagggtgataccaatcattttattatatttcacataataccagcttaagaaacaatgtaatgaaaagtccatgtgctattactttcattgccctgtcaataagatccaggattgcctccctcattctactttttaaaaattattttctcaacttttctgatgtgattcacacttacttggaagcttttgctttttggaattcttttaagaattataacctcttaattgtaacttatacattttacaatttttgtttgaaatgaggaagatgcttttgtaactatatttcaatttcacaagtaatttagggtaaaagacagcaagggatgttggtagtgttgcatccaagtgtcttctatttgtcatgattgtgtaaacacctataatttctcacttcacttctctagcccctctggatggatattcagagaatgaggatgaacattcctctgaatacaaagacttgggatattctttccctttaactgagagaaagaaaagcaaactgaatagacatggaaataataatttgcatcacagacatcccttcaggtcggcagtttgagttcaccttaaggcaatgccactgactggggctttccttgagtgtgtgtgctatatcttaggcactgccatggccctggttggggcttagaacatgtcatcccaaaatataacaccatggtctgctgagtactttcaatggaaggaaattggaagggcctcagaagcaagaatttctctctgaccttctcctattctcctttccccatttctctaccaaaagtgggtcatagaaactaaaactattctccttgaaagcaggccataaaacctataaactttactctctggtcttctcccttttcccttgagggtccttatgtgacaggtgtcataccctatacctggaagaaggaatgctgcatagagaggcccggaagaatctgaaaaaacaggccttactgggctccttcagtttatcaccattacaacacaccctttttgtccaatcgtatttctatacagctgatcctgcattgagtgcaagcaaaaaactgtcaagttttccctggatctttgggctttcatttctgaagtctcctgtgtcacgtaaaactttgttaaataaatttgttatgcttttctcttgtaacctgtcttttgttgtaggagtgtcaggcaagacccttggaatgggtgggcaaaaggtgttactatttcacttctacagcctcaagacctagcaccatctctagcatatgttgtattaatgacgttagatgattgaatgactgttatctcaataattgccactgatttgactatttaagcaggtcattttttccccctaaatattccccccgtgctatactgaaagtcacagaacatcattattgcagaagaatagctttcctcagtcaaggctaaataagttacaggaattgacagcgaacacctcccattcaagttagaatgaacactatttggtcttagacacataaatgttcagacaagaggtttccatttagaagaagccaaccaatgatgagttcagaaaacattcttgttaacacactcaaaaattgcaataaaaaatggagcatcacctgaaaatggtaaactttttaaacaaatagaacgatatgaggataaagggatgtttctaattagattcccttttctaaaatctttcactttccttactagtctgatgctcacagacataaggtcagtgtgatatttttgataacatacgtaggtctgcagagttcatagcactgcagacttgggaagattttacatgtccagtgcatggcccagaggcagcagtatttattttagccagtaacaaacatgataaatgatgtgccaccctccgtcactgctggtcactggaagtgctggctgaccatcagcccagagctcaattcccacaggttccctgccaaactatttgaataaacctaggcaagtttacaatttctgctttggctgaaaaacttctttcacttggcagtctaaatacatttcagagcgtttgaggatgaactgttggtttctatgcttaaatagtaatttcaggtatttttaaaacatcttccttgaaatataattcacataccatacaatttttccattgcttttaatatatttacagacttgtgtaatcatcaccacaaccaattttctaatatttgcattactccaaaaaaatcctctgtacccccaaatcatcccaccttgcctactcctaagcaaggactaatgattccccttccctgttaggtgggctgttttcattatcatttgcttgtttattgattggtgacatggccagtctattttaatgaagtctatttccctgcagtgtctctcctaagtaaggcacagctttggacattcatagttacttgggacaacagttttagcagggctctctttctcctttcctgatctctctgttaagctgcctggctcatttgatatcacatccaaattatcagctgattgctctattgttttggacaatgccctgaagcataccaaaatgtgtctggaattggtgggttcttggtcttactgactttaagaatgaagttgcggacttttgcggtgagtattacagcttttaaggtggcgcgtctggagtttgttctttctgatgtttggatgtgtttggaatttcttctttctggtgggtttgtggtcttgctggcttaggagtgaagctgcagactttcgtggtgagtgttacagcttttaaggcagcgtatctggagttgttcataaattgctctgtagcattatctgattaaacccatgtagtattagttttatttcttgttttgttttcttttggtttttgttttggttttttgagatagagtcctgctctgtcacccaggctggagtgtggtggcgtgatcttggctcactgcaacctttgcctcctgggttcaagcgattcccttgcctcagcctcctgagtagctggaattacaagtgtccatcaccagctaggctaatttttgtattcttagtagagatggggtttcaccatgttggccaggctggtctctaattcttgacctcaggtgatccacctgccctggcctcccaaagtgctgggattacaggtatgagccaccatacccagctgcagtagtagtttttaaagacagtttttgaggtttatggagatcccaggagggcacttcttatgtacttctttctctttttctgtctggtgaactagctggcctatggttaaactttttgctgtcacttaagaagagctatttgttttcgctggatatgaaattctgggttgaaaattcttttctttaagaatgttgaatattggctcccactctcttctagcttgtagagtttctgccgagagatccactgttagtacccttatacttgaacttcaccatattctgtttaaaataaaatcaattcctttggggggcattcagatgtcccttttcctatggattcccctttcatttggttaagatgtctcaaccctactccaggcactggctagaggagttagcctctggtcctccagactttttgtcttgactctcctggcgtggggtgctgcccaaagattgagttcatgtcaggaaaatcagaaccccaatcttcttgccagccatgcacagagtagacactccatcctgactgagagctggtgggaggaagatagccaccaaccctttggcaacatgcacctggaatatatcctcttcatggagttggagaggatgaaaaatgttagtggtttccccctcccaataaaatatggcaactcttgatcagaaattgtaaagagaaggaactcatctttttgacaacttggattgaagtttctgttaggctgagcttagggtaaagagggagagtgtagaaggtggctcaaatgttacagactctcattgttctgaattttagtagattttcttaaatagatgtttcctcatttgctgtatgccatttggacaatttccacagattagagcaaaacttcaatgtctgttccagaaggaagtatcatgttggattttactgtacaatgaagaaatgggtattgggggaacctgcccccaatatttcaacgtaggttttttctattttccataagtgtcggccagctgagaaataaaaagagagacagtataaagagaggaattttacagctgggctgctgggggtgacatcacatattggtaggaccatgatgcccacctgagttttgtattaagggtttcaaaccagcaagttttttcttaagggtttcaaaaggggagagggtgtaataacagacagtaggtacaaagatcacatgcttcaaagggcaaaaggcagaacaaagatcacatgcttcggagggaacaggacaaagggcaaaagcagaactactgataagggtccaacaaagatcacaaggcaaagggcaaaagcagaattactgataagggtctatgttcagcagtgcatgtattgtcttgataaacattttaaacaacagaaaacaaggtgcgagagcagagaactggtctgaccacagatttaccagggcggagtttttatccaccctagtaagcctgagggtactgcaggagaccagggcatatctcagtccttatctcaaccacatcaggcagacattcccagagtggccatttatagacctccccccaggaatgcattccttccccagggtattaatattattattccttgctaggaaaagaatttagcaacatcttccctacttgcatgtccatttataggctctctgcaagaagaaaagtatggctttttttgcccgaccctgcaggcagtcaggccttatgtttatcttccctttttccctaaaaatcactgttattctgttcattttcaaggtgcactgatttcatattgttcaaacacacgttttacaaacaatttgtacagttaacataattatcacagtggtcctcaggtgacatacatcctcagtttatgaagataacaggattaaaagattaaagtaaagacaggcataagaaattataaaagtattatttgggaactgataaatgtccatgaaatcttcacaatttatgttcctctgccacggctccagccatccctccacttggggtccctgacttcctgcaacatctttccctttcttttcatataaatgtgccatggcaatgaaggcttattcattctctcggttttgacgcaggattctttgactggtccagcacactaaaaacaagctgattaaacagagaaacataattccaaaatttactacagtggagcccccaacagacttaatccaagtcgtggggtttggtccagaaagactttctgccacctgatctagtgcctcagttccaggcacaatggataaatgagcttgagaggcttcaaaaatttgtttctttaatttagttatgtccaaggataaattatgttccctacccagcaggtgtcctttgaccatttcccatgaatgatcagtcttcttgtaggaatatggtgtgatacagaaatcagaagtattccaatcgcactgcatttgcatgcgatgtttgagacttattagctgatctccaagccaaataacagactgtcttaaatcattaatttgattagctaatttttgatcaatgccctgttgagaattctacatttgggtggaattagcttgccaatcattaacaaaatcagccctttgaataggttggtgtaatgccacgccggcggtggtggccagtgcagtgactgtaattaggcccatgatcacagcgattaaagtgaaaacgaatctcttagatcttttgagaattcgttgtaacacttcattaattaaatgtactgagggtgaagattcccaaggtctgggtaaagttaccagtatccagattccttctcacttctcaagctcacacaacattacacttttcctgaagtcaaaatgggagttaacacaagtgtataaatgacaattaatgcattggacagtttgattgttcatccaaattttgatatttcccactaacagcatgtaagaaggcttaacacaactctgtataggaatagtcaggttggaggtaaacaaagcggaatgtttcaatctacatcgatactgagggagagaagcggcagtggcaacgcccgatgttctctactgtaaagaagcaatccgaggtgctcaggaatgccgaagaggtggaggcgcatacctgggtgaagaagaattatcataaggccaatcagagtcccataaaggaggatcagcatctaaaagaggaggagagttcaaagaggatttatcatggggttcagaatcacggatgtgaggggcagtagtggggacaacagacagaaaatttcctcttcccatacttgcaggccaaccatggcaatagccaatttccaaagttctgggtgttctgggctcagaatggggaatatcatatgaggcctcatggtgggtaatgcccttgtgttctcattttaagggaaagaactcaatatgcctaggcgaagatctttttgcaatgaatttctcgggtgttctttgtgcttcttatatttggatgtctcggtctctatgagagacaggactagctggatttcctaggctgactaagaattcctaagcctagctggggaaggtgactgcacctacctttaaacacagagcttgtaactcagctcacaccagaccaatcaggtagtaaagagggctcacgaaaataccaattaggctaaaaacaggaggtaaaaaataatcaaatcatctatcacctgagagcacagggtgagggataatgatcaggatataaacctaggcattcgagcagggagtggcaaccccctttgggtccactcccattgtatggaagctctgtttttcactctattaaatcttgcaactgcacactcttctggtgagctgagctttcgctcgccatgcaccactgctgtttgccgccatcgcagacccgctgctgacttccacccctccctatccagcagggtgtcggctgcgctcctgattcatcaaggagcccattactgctcccgattgggctaaaggctagccattgttcctacaggctaagtgcctttgttcattctaatcgagctgaacactagtcactgggttccacagttctcttccgtgacccacggcttctaatagagctataacactcaccgcatggcccaaggttctattttttggaatctgtgaggccaagaaccccaggtcagagaacaaaaggcttgccgccctcttgggagcggcccactccatcttgggagcggccctccactgtcttgggagctataagcacaaagtcccccgtaacatctaggaaggctggagaggttttcctccatttttcccccaaatatgttttttaagctcatagaattctcttcttcctcaagaataccaattatttttaggttttgtcatttagcataatcccagactcttggaggatttgttcatattttcttattcttttttctttgtgtttgttggattgggttaattcaaagaccttgtcttcgaggtcagaatttcttccacttgttcaattctattgctgagaatttccagagcattttgcatttctaaaagtgtgtccaaagtttcctgaattttttattgttttttctttaaactatctatttccttgcatatttcttccttcacttcttgtatcgtattttggatttccttgcactaggcttcacctttctctggtccctccctgattagcttaataactaacgtcctgaatttttttttttcaggtaaatcagggatttcttcttggtttggatccattgctggtgaactagtgtgattttttggggggtgttgaagaaacttgcttttcatattaccagggctggttttctggttccttctcatttgggtaggctctgtcagagggaaggtctagggctgaaggctgttcagatccttttttttcatgggaagttcctttgatgtcatattctcccccttttcctaatggatttagctttttgtgagccaaactgcagtgatttttttctctcttctggatctagccacccggtgagtctatccagctccaggctggtactgggggttgtctgcatagagttctgtgatgtgaactgtctatggatctctgccatggataccagtgcctgttctggtggaggtggcagaggtggcaatggactctgtgagggttcttagctttgatggtttaatgttctatttttgcactggttgacctcttgccaggaggtggtgctttccagagaacatcagctgtggtatcatggggaggaatcagcagtgggtggggacctagaactcccaaattatatgtcctttgtcttctgctaccaggatgggtagggaaggaccgtcaggtgggggcagggctaggcattttgagcccagactctccttgggtgggtcttgctgtggctgttgtggggaatgggggtaagattcccagtcactggagttgtgtacctaggagcattacggctgcctttgctgagtcacgaagtttgtcagggaagtaggggaaagccagcagtcacaggcctcacccacatctcacacaaatcaaagagccagtgccagtctcactcctacaatgccccgggcaacagtccccagacggtttccaggcagacagcaataagggcttgaaaacctgccccaggctatgcgcctcccagctgtgaaagagaaagccttgtggagtctgccctcccccaaattctggccaggaggcttctcgcctctttctaattttcacctctttctaattttcactcacctctttctaattttcactaagtttagctagagatttccttctccctgtgtagttttaccccttgctcctttcccattggatccctgtggtgccaggcagaaatggcctgcttggggacccaacaagctcccagagcctttctgctgcttcttctacctctgtattttgctcagttctccaaagagctccaggtaaagtcagaaacttctcctgcaaacagatcttcagcttctccagtggggatgtgtgtctaagagtggagggtctctctttcccacttctgtagttggggcactgacagttttgacacatctcctgggtcctgcaggaacagtctgcttccttcagagggtctctggatcacatatttagctacacaaaatagatggaggtaaaagagtgaaacatctcgtaagcagaatctcaatgcttaaataatgaattataagtttctgaggcttaaatttcagaaatggcttacatagaggttctcatgtcatgaagaagagatcacagggtggatctacacccatcatgctgatcagatgattgaaagattctgcctggggcctgaaagctaaagggaatgaataactcccccccctcaggaccactcccaaggcacaaggtcacttgtgccagcagcatgcatcagcaagatagcagaagcaggaagagagcaggacagaagacacatacccccgaagatcgagagggaggccatgcgggtactacatagcaatcatatcagactggaacacttcctgtttacagaggactgtgaaacccctgccctgtcctcacttggggctgacgccattttaggcctcagcctgcctgcacccaggtgctcattaaaatagcgtgttgctccacacagccttgtgttgtttgttggtgcgctctcggggttcgaactgatacaagagccttgcaatgatcacacttgtggagtgttcatccttgtggtgtaattagcactgtatgccaatgactccctttttccacgtgtcctttccacacttcacttcaggaaccctgcactgtctattatcctttcttacaactatcttttcaatccccttgactcgacttcttccatcctataagcaattgaacctgctccagccttaacaatttaacacacaaaagaaacaaagcccaaagcctcctttcgtatctattttcccatccagttatcatccctactatatccaaacctcttgaaggcattgtctgtatttattaccttcattttctcaaatcctactcagtttcaaacctactctagtctggcttttatcatcactatagcacccaaagcccttctttagaggtcaccagtgacatgcatgtcactgactccaaggccatgttctcattctcctcttacttgatccatctggggtactgaggcagttcaccatacccttattactgaaacactctatccttgcctttcataaccttacacttttctggttttcctcctcctttacactttggccacctcattcttttccacctggccttaaataagttgggatttctcaaagttttgtctaaggccttttctttaatcctttttctctagttaatttcaactatcaccaaatcaccatggcttcaatcactatctataagtgtgctttttctgtttactccaacttttctcagagctccagatctgtagaaccaacaactgtctcattgccgtcagtgcttgttgatctcatgggcatcctatgcttcacatcttgaagaccaagctcataattttctttccactcctggctttcccccagtatttctgagcccagggtatgtctcatgccagaaagttggaaattatcgtggatatctttccttcactgggatcagtattctaccaatcaccaagatttctaatctttcttctaattatgcctgaaattgacctatttctctttatctccatggctattccctctcacataggctacttcaatatcctccataccggtcccttacatctgctcttgtactcttttaatttatatacctcactgtgaataaaatcatcttttaaaaatgaaagtctgttcatgaaatttctctgcttaacctactttaatggcttcccttttatccctagataaaatcccagattatcatggacctcaaggttctgtatgatatgatgtctgtctgcctcatcagtctcatatagagacatttattcctccatttcttctacttctgcctcatcagctttcagttccttgaatatacttcttcctgtcttagtgcctttgcctacactattccctctgccgggaatgatctgtccttcagtgaccagctaactcccagtaattcacatgttgctaattgtttatatattacttctgcatttcctgatcctctaaaatagttgagttccccctgtaagatgatctcttagctccaccatagcacgtattacagctgcaattaattggttggttgttatttggattctccactcaaaaaatatgattgaatgagtgactctaaagggagtctagttctgtatctctagttctgtctctccccttgggctttttttccctttctgaatatgacctctgaatgtgcccactcttaaatccacaatttcagccaacagtctcaccacctacatcatcatcaaaatcagagacaagggagtcaccccagagtcctcttttcacctcatctccatagcttatgaatctccaagtcttgttggtttagcttacaaggcagttattggtgacttttttccttcaacttttattttaagttccagggtacatgtgcaggatgtgcaggtttgtgacatgggtaaacatgtgccatggttgtttgctgcacagataaactcatcaccttaagcccagcattcattagctattttttgggatgatctccctcccccatccatcccctgacaggccccagtgtgtgttgttcctccccatgtgtccatgtgttctcattattcagctcccacttataaatgagaacttgctgcatttggttttctgttcctagattagtttgctgaggataacagcttccagctccatccatgtccctgcaaaggacgtaatcttgtccctttgttttattttaagttccagaatacatgtgcaggacatgcaggtttgttaacgtaggtaaacgtgtgccatgatggcttgctgcacctatcaacccatcacctaggtattaagccccaaatgcatcagctatttatcctgatgccctccctcccccactcctacaggctccactgtgtgttgttcctctcccagagtgtccatgtgttctcattgttcacctctcccttataagtgagaacatgcgatgtttggttttctgttcctgtattagatcgctggatcttgttcctttttatggctgcatagtattccatggtatgtatttaccacattttctttatccagtctatcactgatggacatttgggttgattttatgtctttgctatagtgctgcaatgaatatttatttttataatagaatgatttatattcctttgggtatatacccagtaatgggattgctgggtcaaatggtatttctgcctctagatctttgaggaatcgccatactgtcttccaccatggttgaactaatttacactcccaccaacagtgtaaaagtgttcctttttctctgcaacctccttacaaggcatttattatatgtgtgctgctgtccactatcttcacaacaacctttgagtctttacttgtattcatcggttcttatatgtttgtttgtttgtttgtttgtttgtttgtttttcaataactatttgtttgaactattgacctatcaaaccacttatccttttataattctattttgaaactgaatcaacaaaaacagacactgtttgggcagcttttatttctagctcataatccaagaattttcctcaatggaaaattttgatgctattttgatgaaactcgttccaagataatgagttcttttggcggtaaaaaaccaatgctctcctttataatataaatagttctagaattaatatccagagataagtttctagtttctatttaacttttcaataatttcctgaatagtatttcatttccaaataattaaaaaatgaacaatagaaaccctgtgagagaccgaatatgcaaacagacagtggccagaccacatataaaacagaacactgacccactacctctacaacaaccagcctaggaagccaaaccacaacctctgcagcaatcagttccaaacagtcagcacttgctcggttactgccagctcccctaaattttacccctgttttcaactcaagctcaaccagagaaagccaaatatgcttcccaagctagtcatataggatgctttgtttctggttagctcacctccaggttcctcattctgatatgagatgggggacagggaagcgctgggtagaaaagggtggggttcctggtgagggctccactcctgggcctgtgcccatgaacctaattgagaacaggcactcctgtttgcacccaaatgttgcattttccaagaccattcttgcctgctacaccccccccccatcctgtgcccatgtaaacctgagaccatagcaggcacagacgcaagcagctgaatattgagaggagcagaggaatagaccagcagaccccagcagaccccagcagaccagcggaccagcgaaggcagaatgacaaagcagagaaagagaaaagagaagggaggtctggaccctgaggggagttcaactgggggcagtcagagaagggtctggctgctgggtggcccaactccagggaaagaccatcttcccactccatcccccattctggctccccatccatctctctgagagccacctccaccactccataaaaccttgcactcatccttcgagcccacgtgtgacccaattttcctggtacactgggcaagagcttgagatacagaaagctgttacactggccctctgcccttgtgagggtcgattgagctgattaacacaagccatttgcagatggcaaagctgaaagagcacactgtaacataagccctcttgagtttcaggagtctcagacacccactttagacactgccgtggggctggaacccaaaaaatgctccccacggccgcttgctgcacctgcccgtctgcatgctcccctaggggtcggaagtagcgagccataccctgtcacacgtcctgtgaagtgaataagggaactctcctgtttcagttccaaaaattgaccatcagaacataactgaagccttctctctttttttttttttttttgaaaggaatctcgctctgtcgcgcaggctggagtgcagtggcaccatctcagctcactgcaacctccgcctccccggttcaagcgattctcctacctcagcctcccgagtagctgggattacaggtgcacgccaccacgcccggctaatttttgtatttttagtagagacggggtttaaatatgttggccaggatgatctcaacctcctgacctcgtgatccacccgccttggcctcccaaagtgctggaattataggcgtgagccaccgcacctggcagccttccctttttttactgtataattttcccattcccccgcctgccctcgggtctgtgccaaatgcaagcgatggaggctgactctcctgctatggcaagctcccaataagtaatcactgatttttcttatttgggtagtctttgtttatttccaaacctttgtttttgttttctttaaggctcttcaagttcacacctgaatgacgcattattcttaaatctacctgatctacctatgtgaatcttattttagttatatatatatatagaattgtagcttcataaagaaaagggaggattttacctgaaacaatgcattctatttagaatctggatggaccggctgaggtcagaagggctggtaccctgaaaatctggccatttcctaggagatttgtgaggcctaaagtcccttgtgtaaatttcctctgctctagccttctctaatgaactgaagggaacacccatcctcagataaggcaagtaaatagtccattgtttgctctaaatttaagagtatcttaagagcttttataggtactcttatctccttaatatttctgagatggctcctaggcttcaagggtgggaaatataaacagtgagcattgtgcttccaaaagggctgaaggaggaggagttaggaaaagggtaagctttattgggagggaagatttttccaggcttaagtgtaagacagaatgctttttgacagtagagacttccagacttagagccatagtattgctttctcataagtgaattgaaagagagtatttaatttctgaatggaagctactgtatgattactaaaggaatccaatatataaaggttccaacagatggcaactgtctgtgtaactgcaacccagatattgattatattagcaacattttaaatctttgcaagacctcccaccttctgatagggtctgatagcattaaggctgttcagattggcagtgtttcttcaggaaagcagggcagagtaagtggtaaaagccagcctcagaggctggcagcaactgatgagtccttgttaaaatactttgtttttcctttattctcaaattgggtgtaaactttgtaatacatatttgaacttacagggaatggtttttattaaaccctgtaaatattctgggttttctgttgttttattgtatgtctttgtcttcccatttgaccctaatattagcttctttttgtcactacagatttttttaatgcttccttaatcatttgagctgaataaatatcatctttcttagactgttagctatcaaacatgtctatttacatattgaaacaaacactgaggtgttcctaatatatttatgaagacatgttattttaacattggaccaaaatcttctagagtgttaatatagcctcagagctttagttctgcattattgtcaattaaattcaagacaaaaccatttacagccaattgtaaggaacatactctggaaggtgggtgggccacagagatcactgcctaatatatatgcaaatgattacaaagttgtgcagagtggtcaatgatgtcagagatgtatggatgagctgctatggtgacccaatggatggagaaattaattctggtgagacaaccttagggacggagggtttacaaaagaggtaaaacttaagttgggccttaagatattggtaaattttgaaagtcagtgatgcactattaaggacatccatatgatggcaagtgcaatgctttcagggaaaggcactgtatatcagaaggaagagtttgagccaaagcagagtgttggaaacatcctgggcaagtttgaatgagaaacagttgcccagttctctaggccacttgaaccataaggacagggtagtgagttaggttctgattgtagcaggaaataccatgttaagatttaacttgaacatgttagacgtgaaggaaagtcaatgaggactttcaggcagaaaagaaacacaaagatttgtattatagaaatactttttgtgttttagaaagattattttatattcaaactagattcattatggatacacataatagcttttgatagagatgcagtgatttatgagtagtgataatgatgtggtcatgtgaaagtgtggcaaatgaggacaaatgaagataactttaggctttggtggtggactaattttatttagtttttagaacatatcacaagattatttatcataactgtgcttttaaaaagtagaagaatttgaaattaatcaggatttctgcataatcatatttaagaacaataacgaagtgcaacatctcatatttaccagtacattttctgaagcatttataaatctagagcatgcgaaatgggctttcagtgctcagatttcctatttcttgcatcttttcacatgcctgagaaactgagagaaagagggagaagttttctcttacccaagtaaaatgatgagaaaaatgatgagaaaaattgggctactagtcagtcttatttgaataattttaaaatcaaatgtaaggatgtgctttgagttggggttgtgggaatattacaggggaaaaaagcgatgaaagggagttcatctaaatacctaaggtgtcaacaaccaaacatcaaggttctctgattcaccagggaaggttgtgatgaccccactggcagttcatctaggttttctctctggtcaaacttaattttctgtttaagtgaaaagggagtcttggattaaatggatctgttctcaggttcagcgtcctaagggagttataattaaaggcctccggcctttcacagattatttcatttaggctgctgggatgccttctattagcaaggtggttggagtgtcaaaacttcagaatgacattttcaatgtccctggcttgaataatctggagacattgattctgatgttaggctctcacagccctgaagaccttcctgtgcctcttttcgttgactccctctcactcttacatgtaactaactcccagtacagtcagccacatgccccaaacataggctagctacttcgtgtattcaaactgctaaacagggttaaccttcctcgttgtgcacatggatgaggatgcttccagctgatgcttctgtcagttacatctacctttactcttttctttgccattaaataagtttactaaatgtagtgcaattattataggaaagcaacttcgttttcacgtttttacagtcccagtctcagttggtatagttattaatgccatatctctgtaccatccacccaattttgctgtaaccctaacattactctaaaaaatagtctattaaaaattaacaaacatgatatcattttaaatcctctatgtaaacagttttctttttatgacttcaatggaaattgaccagtaaactattatttatgactgtatatataaccatattaccatctgtccagggttgttctgggaaccagattttatgaagagcatttgtcttgtgcagtatttcagtacttaaaagacatatgggcctccttcaaagacctttcataccattcagcaatcaataaaattattttcctccttgttaatgtatggaacagcagaccaagaaagtaaattttgttgttgttgttttcaaaatatgtagtaagaatttcttaaactgcttggaaaatattaacaaaatttaactgttggcaagaaagttttactgaaataagtcaagttctgttgtgtttctaattatattgttgttaataattataaatatttttgaagatataaagtgttaggtataactaaactctgataatgaaaaaaacagcatattattcatgtaccatatctggtgaagaaagtggggctgatatattaaaatgaaagacactggatgatttagtgactatagaattgattttgaatgaggtgaaaggttttgataaaaataaatacaacttaaaagaggaggatcatgtgttcttggttttgtatttttattgcctacacaagaaaaactcaaataattagtgttctattacttatattgattaaaatgtacagaccttaacaaatttgatttcaccttgtgatcaaaagactacaaaagatgttgaaagatgttgaaagatgttcatcggctttctaacttcagtgtgtagtttaatcagaaagcgacattgtatctcaaaatcaaaaagaagaattagatgaaatattcattacttcatataaagggctattatgctataaagagattccatactgtaagatatcatagaagttagaaactgaaaagacacattaggtcatctggttggtctctgtactgagaacagcattgttttgcacaatctactcttcagtgttttgtaatgtcaaaatattctaaaacactaagttgaagcaaaaatatcttgtaaccctggagttgtgaagtaaatcaaagtgatgggagactagattactattcaaagcaccatctatgctccagaagtctactaatgcatgaagaagtcactgagaaaagcagtttttaaaagaataaggaatagaaaacactgacacagcagagaactggagagggcaattcctaaatgacctggagtccagagaaactcagatgtacatacttaagatgtagaagacatcacttaggagtaaacactgtactttcttagaggtgatcaaaaggaaggagttgacattgaaatgggaaatgactttctgtagctagtatatgtgtgggaggaacaagaggagcaaagacatcagaaggccaaggagaaacagccaggccaagccatgtcctttctgtcatgtcagcttctgacaagacacacccttaatgaagctctactgtggggattagaaaactctcagcctcccagtcaacccagtttagacatagatatgctgaactattcctcacacaccgtgggtaacccccttttccctaatttttcaattttaatgaaaaaaataaaaaataaaaaaaaacttatttgggactcacctatatcttataatcaatctttacagtaagtttatgaggcatattcatcccatttaacatgagataaaattagagcttccagacatggagcaacttggtcagggtagacagttactggtctatctaattccaaaattatcctgcatcgctgtattagtctattcttgcattgctgtaaagaaatacctgagactgggtaatttgtcaaaaaagaggttttattagttcatagttccacaggctgtacaggaagcatgatgctggtcatctgcttggcttttgagaaggcctcaggaaacttacaatcatggcagaaggtgaaggggaaacaggctcatcttaaatggccagagcaggagcaagagagagagatgagggagctgcacactacacacttttaaacaaccagagctcactataactcactcacacactatcaccgaggggatcgtgctaagccattcatgaaggactaccccagtgatccaatcacctcctaccgggtcccacctccaatactggagagtacaattcaacatgagatttggtggggacacacagtcaaaccacatcaatcaccaaatgcatctacatgccttctaacatacttttattgtgaacttgggtatgtatatctatgtctacatatgaattaattaagtattattttctccttttgtctagatacttcatgaatatccactcatgttttagatttcctatcttacataatgacctgttctaagaccttggaatcacactcacgttacctgctgtttcacaggggacatattatcaggctgttatacagcatgtttctccctctctccaacatgtaaacattggagttcctaaaaggcaattcttaggcctcttttgatttctctctaaattatcttccaagaagattttatttgtttccatagtcatatcgttggcattgtgtcaccacccaaatctcaccttgaattgtaataatctccttgtgtcaagggtgggaccaggtggagataattgagtcatgagggcagtttcctctgtgctgtgatagtgagttctcatgagatctgatggttttataagaggcttcccccttcacttggttctcattctctctcctgacgccctgcaaagaggtgccttctgccatgattgtgagtttcctgaggcctccccagccattcagaactgagagtcaattaaacctctttctttataaattacccaatctcaggtatttcttcatagcagcatgagagtggactaatacacatagctttatatttcatctattaaatagaaaactaggatgagtcccatatttatatctctagcccaaaatttccccctaaattttggactcatatatccaactgcccactcaatatatctgtttaaatatgactcacaagcatttcacattaattatctgaaataaactcctaatctttcactacccccaattccaacactttcttccttgagtctttcctgtatttgaaaatagtaccaccattccatccagttgctcaagaagaaaatcctggatttgggatggatacctactctttgtcccatttgtaatcttcatttgaaatttcccacagtcctgatcatgaagtttagttcaggaatgggcatgtaatctaggcaaaagctgatttaatcaaagtaaatttcagagaattatcctggacacaggattttgtttatcaccttcctgcaacatggcagtggagcttccaaggttggagtcacggctaatgaagcaaagctttaaaacagggagagaaaagctgttttgcaactaataagctatgtcctggtcatatcacatgaggcactagactaaatccatactgaatctgatcctactattgaatttcagtagctagtcaataattcctctaattgtttatctgtttccattgagttttccactacttgcaacacaaagcatactaccacagttgtatacatgaagtttaaagttaaaaaaaataaagggagaactagaaagtgattacatcaatggagaaaatgaagtctgaaaagagatccatgtatatatggaaatctagggtgtaatcaaggtgaaatttttaatctggatagaaggcatgcaccattcaatgaacagttttgagacaacgagctttccatttgaaaaacgacttttatttactgtagcttgtagtatagtttgaagtcaggtagcgtgatgcctccagctttgttctttttgcttaggattgtcttatttatacaggctctatttttgtttcatgtgaaatttaaagtagttttttctagttccatgaagaaagtcaatggtagcttgatgggaatagcattgaatctataaattactttgggtggtatggccattttcacagtattgattatttctatccatgagcaagaaattttttcccatttgtttgtatcctctctgatttccttgagtagtggtttgtagttctccttgaaggagtccttcacattccttttgagttgtattcctggtgttttattttctttgtagcaattgtgaatgggagtttactcatgatttggctctctgcttgtctattattggtgtataggaatgcttgtgatttttgcacattgattttgtatcctgagagtttgctgaagttgcctatcagcttaaggagtttggggctgagatgatagggttttctaaatatgcaatcatgtcatctgcaaaaagagacaatttgacttcctctattcctatttgaatacctttatttttttctcttgcctgattgccctgtccagaacttccaatactacgttgaatagcagtggtgagagaggacattcttgtcttctgccggttttcaaagggaatgcttccagattttgcgtgttcagtatgatattggctatgtgtttgtcataaatagctcttattattttgagatatgttcaatcaatacctagtttattgagagtttttagcatgaaaaggtgtttaattttgtcgaaggccttttctgcatctattgagataatcatgtggtttttgccattggttatgtttatatgatggattacgtttactgatttgcatatgttgaaccaggcttgcatctcggatgctgacattatcgtggcagataagctttttgatgtgctgctggattcggtttgccagtattttattgaggatttttgcatcgatgttcatcagggacactggcctgaaattttcttttttgttgtgtctctgccaggttttggaatcaggatgatgctggcctcataaaatgagttagggaggagtccctctctttttattgtttggaatagtttcagaaggaatgataccagctcctcagatatatacattaatggaacagaacagaggcctcagaaattacaccacacatctacaaccatctgaccttcgacaaacctgaccaaaacaagcaataggaaaaggattccctatttaataaatgatgctgggaaaactggctagccatatgcagaaaactcaaactggaccccttccttacaccatatacaaaaattaagatggattaaagacttcagcataaaacctaaaaccataaaaaccctagaaggaaacctaggcaatacaattcaggacataggcacgggcaaagatttcatgactaaaacaccaaaagcaattgcatcaacagccaaaattgacaaatgggatctaattaaactaaagagcttctgctcagcaaaagaaactatcatcagagtaaacaggcaacctacagaatgggagacaatttttgcaatctatccatctgacaaagggctaatgtccagaatctacaaggaacttaaacaaatttataagaaaaaacaaacaaccccatcaaaaattgggcaaaggacaagaacaggaacttctcaaaagaagacatttatgtggccagccaacacatgaaaaaaagttcattatcactggtcattagacaaatgcaaatcaaaaccacaatgaaataccatttcatgccagttagaatggcaatcattaaaagtcaggaaacaacagatgctggtgcaactgtggagaaataggaacacttttacactgctggtgggagtgtaaattagttcaaccattgtgaaagacggtgtggtgattcctcaaggatctagaaccagaaataccttttgaccccacaatcccattactatgtatatacccaaaggattataaatagttctactataaagacaaatgcacacgtgtgtttattgcaacactatttacaatagcaaaggcttggaaccaacccaaatgcccatcaatgatagactggataaagaaaatgtggcacatatacaccatggaatactatgcagccataaaaaaagaataaattcatgttctttgcatggacatggatgatgctggaaaccattatcctcagcaaactaacacaggaacagaaaaccaaacaccacatgttctcactcataagtaggagttgaacaatgagaacacatggacacagggaggggaacattatacaccagggccttcagtggttgaggggaaaggtgggggagagcatcaggataaatacctaatgcatgcaggtgttaaaatctagatgatgggttgataggtacagcaaaccaccatggcacatgtatacctatgtaacaaacctgcatgttctgcacatgtatcccagaacttaaagtaaaatttaaaaattaattaattaaaaataaaaagtaaaactacttttagatccttactcctcactattaataaaagcacataaaaatggcttaaatatttaaatgtaagcagataaactgacaaatctaagaagcaaacatcgaaacatgtacatattaattggggtagggattgccttttaaaataagaaacaaaaaacaaagttacaacaggagaaccacaaaaagaaaaaagtaaattcgacaataacaaaattttaagttttatatgacaaaagatacactaaaaccattaaaaagaaacatcaactagcagaatatatgagacaaagaatattcaaaaatataaataacttctacaaatgtataagaaaaaagccaataacaatagaaaaattgttacataattaaacagataattgacagaaataaaattaccaatggtcaataaaaatatagaaagctagtcaagttttctgggaatagtgaaactagttaaaccaaatatgagagcccttttcaccaatgaggaatgagttcttttcatctactagtagtacttttcatcatttttcacctgctagaatggcaaaacaacaataataataatcatggcttggccattgtatagctaagtactctgttgataagaccataaattaattctactttgtgataaatttgatactatctagttaaatttaaaatgcaaaaagcatatgacctagtagttatattttggctatctattctagagcaatacatgtgatgttttcaagtaaaaggaagtatataaaagatgtttattgcagtcttggctttaaaaaaaatagagaaactttaattgctataaaaatgggaattgttaaacaagttttgacatattaatgctgcagaatgcactgcagcacttaaaaagagtaagataatagacagccaaaataaaattgctagatcctatgttatttgtattttaaatttaatcagacattgtcacagacagtgtcaaattcatcacaaagtagaaccaatttataatcttaccagtagagtatttacttatgtcatttatttctagaaagttctactagatgaattgttagaactacattccaattagcaccatgacatagagtaatacttttctataaatatgcaaaagaaaatattcacaaatataaaataagtgtaaatgtgtaaaaagaaaaataaacactaaattacaccatatggcctgatatgcatgaatagaaaaaattctgaaaggatacataccaaattcttatttgtggttaacccagaagagagacaaagactaggagaggtgatcagaaggaactgtctaatctgttatatttttaggttagcttaattttaaactaagagaaaagcaatttctgtgtttcctatggaattgaaattaatagtttctaaaagaatttctcttgggattattaacatatttggacaatatttatgcaaactggaaaatggagtcaagaatctgttgttaaaataggcaaaatattgtgcagtatcctgtacaatgttttgtcttaacagagctaattccttctggttctgccatatgctgcacttgagtgttgcagaagcaagttttgaccaaagataaaacctagcaaggcgcagagtgcagaattttcagggataatactcacttacagaaaccatttagagtcattttctggcagggacggggcagagcactgccaagattataagaccagcctgcaggaggtatttaacattttctttggataagctactgaaacccaagagtagaaattcctgggacagcattgtaaaagagagtacatacaagtgtttgatgatagctaagttcactgacgaagaaactattccttgcttcaacctgtactttacctttagctctaacaaattttaggtcgacggaagtatgcagcacgtttccacgttttgttttctaaattcctacccctcgtttctactatgaaccccaacagtccactctccctacagcattcaaagtgatcttttaccaaaggtcactcgaattccatcatatttgaaataaatccaaatttctgacattgccccatagtcccacttgatctgacactaggtccactctccaatctcatgcctatggcaaccctccactctacctcatcacatgagacttcttgcttttccttaaaagtggatgcatatcctgcagttctctgttcctaaaatattcttcccctagacatgcgtctcttcactccctaacttcttttaggtctcagaaaagcttttatttatcactctgtcaaaaatatcaccctccacaacactagactccttacattgctatattttaattttatttttaaagtgtactgtgtaggctcttttcaaataaaaattatatattataatgtacagcataatgttttgaaatatgtacaatagacctctcaaacttattcctcctagccattgaaattttgtattttaaataaacatttccccaaccctgctccctcccttcaatctttggtaaccactattttactctctacttctacaagttcaacttttttagattccacatgtaagagagatcattgtagtaattgttttttctgtctggattatttcacttaatagaatatccttcagtttcatccatgctgtcaaaaatgagagtatttctttgattttgaggctgagtggtattgcatcatgtatatataccacattttcttaccacattgatggacatttaagatgattacatgtcttggttattatgaataatgctgcaatgacataagagtgaagatacatttttggcatactgattacattttctttgaatattatactaggtgatgggatttctggatcagatggcagttctgtttttagttttctgaagaacttcaatactgttttccataaagactttactaattaagggttcccttttctccacaatttcttcaacacttgctatcttttgttttttgatgatagccattctaacaagcatgaggtgatatctcattgtggtttactttacatttccttgatgattagtgatgttaagcattttttcatttacctgttggccatttgtgtgtcttcttttgagaaatgtctattcagatcctttgtccattctttttttttcctatttttttaaaaattattattatactctaagttttagggtacatgtgcacaacttgcaggtttgttacatatgtatacatgtgcaatgttggtgtgctgcacccattaactcgtcatttagcattaggtatatctcctaatgctatccctcccccctcccccaccccacaacagtccctggtgtgtgatgttccccttcctgtgtccattctaaaatcaggttatttgttgtattactattgagttgtttgaggttcttaaatattttggatattaatcccttatcatatgtatagtttgcaaatattttctcctgttccataggttgtctcttcactctgtggattgttttttttcagctatgaagaagctttttgttcgatgtaattccatttgtctatttttgctttagctgactgtgcttttgaagtcatataccaaaaatcattgtccagaccaatgtcgtggactttccccccatattttctttctttctttttcttcttcttctttatttttttagagacatgatccttctctgatgcccaggcttcagtagttcagtggctattgacaggtgcaatcatgatgtactacagccttgaaatcctgggctcaagagatcctcctgcctcattctcccaagtagctagaattataggcatgtaccactgtgcttggctattctcctacattttcatctggtagttttcttctagtagtttcaggacttacatttaattctctaatccattttggtttgatttctgcacattatataaaataaggattgaattacatttaagttactaatccattttgatttgatttctgtatattatataaaataaggattcaatttcattcttatgcaaatggatatccagttttcttaattccatttattaaagaaattgtcctgtccacattatgtgtttttggcacctttgccaaacattagtcaagcatacaggcatggatttctttctgggatctctattctgttctattggtctcatttctctaccaataccatgctgttttgattactatagctttgtagtatattttgacattaggtactgtgataccttcagctttgttctctttgctggagattgatttgcctatttacaggtttttgggggacttcatacaaattttagaatggccttttctatttcagaaacatgtctttaaaattttgataggaaatgtattgactgtgtaggttactttaggtagtagcacattttaataacattaatttttctaatttgtgaacatggtatatctttccatttatttgtgtcttcttcaattcccttcatcagtgttttacagtgtaaggtctttcacatttaacattagttaaaggtattcttaagtattttattttatttttgtagctattataaatgggattgttttctttatttcctttttgggtagttcattgttggtgtatagcaatgctattgatttttgtatgttgattttatatatctcacaactctactgaattcatttattagttctaacagtttttttttttagtagagtccttaggtttctgtatataagatcatgttgtctgcaaacagacaatttaacttcttcttttccaatttaaatgcattgtatttctttcccttgccttaattgttctggctaggacttccagtaccatattgaatagaagtggcaagagtggcatcttgtatttttctggtcttagaagaaaagctttccgcttttcaccattgagtataatatttgctgtgggcttgacatatatgatctttattgtgttaaggcacatttcttctatatctaatttgttgagagttttttaaatttaaaggaggttaaattttgtaaaatatttctgtgtatccatatacaccatggaatgctatgcagccataaaaaaggatgagttcatgtcctttgcagggacatggatgcagctggaaaccatcattctgagcaaactatcacaaggacagaaaaccaaacactgcatgttctcactgataggtgggaattgaacaatgagaacacttggacacagggcggggaacatcacaccctggagcctgtcatggggtgggggacagggggagagatagcattaggagaaatgcctaatgtaaatgacgagctaatgggtacagcaaaccaacatgacacatgtatacctatgtaacaaaactgcatgttgtgaacatgtaccctagaacttaaagtataataaaaaaaagaagaaaaaaatatttctgtgcatcgattgagatgatcatatggtttttgtttttcatatggtttttgtttttcatgctgttagtgtggtatatttatatatttgtgtatgttgaaccatccttgaattccttggaaaaatcccacttgatcatggtaaataattcttttagtatgtagttgagttcagtttgttaccattctggtatggatttttgcatctatatccatcagggatattggcctgtaattttcttttattacagtgtatttgtttctatttggcatcagggtaatactagtctcttaaaatgaagatggaagtattacttcttcaattttttggaggcatttgagaagaattgatattagttcttctttaaatatttagtagaattaaacatgaaggcttcaggtcctgtgcttttttttttttttatagtgggaggcttcttttttactgattcaatctctttaatctttattggtctgttcaggttttctatttcttcatgattcagtcttcataggtcttaacgtatctaggaatatattgatttcttctaggttattgaacttgttggcatgtaattgtttatagtagtcttatgattctttgtgtctctgtgatatcagttgcaatatctcctttttcatttctgattttattagtcttgtatcttttttcgtagtctaactaaagatttgttgacttaatcttttcaaaaatatcacctgttagttgttctttctgttgcttttctagtctatttaatttatttctgctctggtctttattatttcctttcttctgctaactttgggcttagtttgcccttgtttttctagttccttgagggtgacattaggctctttattttggatctttttcttttttgatgtaggcatatattgttataaacttccctctaagaactgtttttgctgcatctcttaagttttagcatgtttctatattcatttgtttcaagatactttacatttttcttctaacttcttcattgattcattggttgtttaggaacatgttgtttattttcttatatttgtgaacttctcaaatttcttcctgttactgattttcagttttatccccttgtgattggaaaagataattgatatgatttcaactttcttagatttgttaagcttgttttgtggcctaacataacctatcctggagaatgtcttatgtacacttgagaagaatgtgtattctgttgctgttgaatagaatattctgcatatatctgttaggtcaatttggtctaaataaagtttaagtccaatgtttcaatgccttatttttactcgtggaatttatcacaactttatgttgtatttcttaactgtcttcctttctttggagttataagctctaaaggagcaagaatttgtttcttatcttctttactgcctagagcagtcattggagtgtattaatcattcaatgaataaatgtattaatcattcaatgaataaatgtattaatcaacaaagaactgaaactaaaagcctaacccaaggttacaaatcctgtaatagctaaaagcagaattcgacctgacatgtttaactcaaacctagtgtttattctattataccagtaatgtcacagtatttatttgtataaactcggaatatctttcttggggaaaggaagcaagtgcttggttagggaatggtaaaaacccattatcagcgatagtattgagatttgaaaaccaaagctgatatgtttcaggttactgtgttccatttgcaatgcttatattctgaatgtctattaaatagtgaggttgaagaggtctatgggatgtgagtattacttgcatcccagtaattctagcacatattattttggagctgaagctataggaacaatatcttcttgtgtcgaggtaacctaaaacagtagtgagaaagtagcactactggaagatatcacctgtcacttggtggctacaggttttcagacttaatgcgtagaaaagagtcttaccttgaaaccccaatcctaaatatagtagacttttcctggtattgactaagttatcaaactctggatttacaattaatctgcaaaataattcaaacaattccctaatacctagctctttatcatgaaaatgtgccattggtcttgaaacagttgatgctttgcccacatgaaaaaaaaagcagtggtatcaatagccaacaccacttagctaaatgaccttgttcctagaaacaactgcttaacactattgtgtacagagtcctggacatactgtaacttttctgattatcacaatgcaccaaaatacatcatctactaatgcactgtatataaatccaaacatgcttattccaaggagaatgtctctccctccctaattttactttggtagatttatttcctttttgggaaaacgcattttcctccctttccaaatatttaggtcagtgaactcatttctggaattcagaagtctagagactttaagatttggcagagaagttttgagactgtcagttaaatacaatgagttttgcattctctaatgaaataaaaatgtaagcttacatatccagccttacttcaacattctgtactaccactaaaagagagcattttgtgtcagatctaaaagtcaggaaccttatgttacactggtttatgactaagtcaaatctatatctgccctctaaataatatatcttattatatcatcacttgagaggggatgaaggccagaaggatgtatatcaagtgagttcactggcatattgcaataaagtacactggcagttaaataataagtaacagaaaactttcagaactcataatgaaaaaaattcaattgcctttctttggataatacagagaaaacagaacaatcaaaagacaaaatataaatttaaaaagctctcaggctgttttaataattctattgcaattggtagttctctgtacacaagaagaaagataaagcatttggctttataaatattatatatagataatttttcattttgctttacatatgtattttatatttcaaaataaaatacatgtaataattatcacaaaacacttaacatttttattgagaacctgtaaggtgccagatcctcaggaaactgagacctagcaggttaatttgcttagctaggacatagattccatggtacaccaagctgactccaaagtgcagaatagctaatatttattgcgtgttagctaattatgaagtactctaccaagctcttactcctcagaacaactccatgaggcaagtactacagatatgaacatccctgctttacagatgattagaacaaggcttaaaatgtataactaactgtgccaaaaagctgcacagccagcctgtcatggagttcagacatgagcccagtactgtcagccagaatctctgagttttgagaacccctttatgtagagaacaccctatttccttgcagtggccaaggcggccgcaaaggttgggaggtgggggtgagaatggaagtggtggattgtaggctaagtgagacttccacgcagaccttcctgtcctgtgtgttccccctgtagcggctccctgaaatgacctctgatgcttcccagggaagaggcttagttgaaagccttgaatgataatgcctgcaaatgatcatttcccttcctttccctctccttcccacctcccttccccttttccttaaggtgaacgtgtcagcttatttttcaattttattagagcatgcaacacctaggttgaacaggcaagagtgttaagagtgagaaaacaattaactacagcaaatagaatgcagaagttttctcctttttgtgtttaattccacccgagttggccactgaaaacctgctgactcactctcattttactttcttttctgtaattgcttaaaaagtatactccaaaactaactgtcacccaattcacttagtcaatgttgtgggaatgtcaactatcgtattccatgaggaaattctatctctgatgccatctttggggggcaggtgttataatttgtttatacaaaggtcaatgtcaggctccgtgacttctctattttccatgactataagatagcacactcttttctttgcatgagggtgtgttagtgtgttctcatataagaaagaaataattggatctagtgttttcttttctcaatcttttattttatctttggttaacatgttcttatcaaagtcatgatacagagtaccaattgccaatccagtactccttatcttccaccttactaatagaatgccaatttttagctggccatagggccacttggaataaagataacaattccaaggctgctcagggctgttgtacctaaccatttagacctgtgagggtagatgtgttgtgagagacttgaagaaggccctttaaaagacacttagaaacaaactcattttgacttctattctttttgctctctggaatgtgggtgagatggttgaaactccagcatccaccctagaacatgtggttatcttgagtatggaaacaacacaccaaaaatggcagaggagaaagatagaggagtctgggcatctagtgacttcatggagctgccacaccaatcctggacttcctaacccttgtcttcttttctgtaagaaaatgaccatttgagtgtttgagccactgttattttgagattatttccatttctaactgatgtaagaccatttttaaaagaaaaatgattataattttgggggaggggccatgtgtagtatgctaaacttggttggttataaataaccatataagccccacaatagccctatataacgatgaatataaccaccacttcaaaattatagacagtaaggcttggaaagacatgtttgaggatttactcagtccatgcagctagttaaaaacaaagacacaatttaaactcaaatctgtatatttagattctggatcctattattttctctttttactattcttgcttcttgtggcagtttgttcatatcacaacaaactctcttcgattcagatcctacctctgacttttctgacctttgttcatttaactctaagcctcagtatccccatctggaaaacaggattactaggagtgcatatttcttacgatttggggagctcaagtatgttaactaatgagaaacacttattaaaatagcttatacatataatgctctcaacaaatagttttattgtgtaattttattatatttacactgtattagagttaataatttctatgcctgttttactcaatagattctaagggtcttggtggcaggaaatatacttttgtcatctctgtgtcctctgtacattttgaacaatgctttgcaatttgtaagtgctctataaatgttagttgaatttaacttacttgggaagcagtcttgtgggacttattttgctgatagtttgtttaaactttatttttatgctcatttaggtatatttcatggtcattttcatgatctatatgaatagttaagtctgaagaatacaatttgcctgagtgaaacagaggtcatttatcagtcatttctttaatcttaagttaatcttcagctaatgagatttagccataaaagcattaatttataaaacattctgagatgcaaaaactgtttcatggccaatattaacccttttgaaatatttacaccaaattctactttaatgtttatcattgacttatgagaaataaagaaactctctgtgtcatttgtacttaactataaaatacaagataatctttgttttgcccatgtgaaacagttcctaaactgacaaacttgttcattatactcaaatctcaattgatgttgccaaaatgcatcaaactagttctttcttcaaaagcctatcccataagtatttctatcataaaatgtaaataactaaaaatttgcataaatatttatttttctcttagacatacttcaataggacaatctcgggtcagaatgtgtgatgctgttaaaagaaaacttaaaagtaaaatgcagttcagtgtccctggggatctcacattttagggcagaattctccagaattatcttctgttatttgttaaagtaacatgtgaactttggaagagatggcatctttcagccaaggaaatatcaatgctaagagcatgaacttgaatttaaaccaattaaaacaaaattatatttatttggcaagataaaggtatttctgataagtaaacaaacaaaatgttactttatctcattctttacaactaacagaggatttgattgtagctatttgataatcaacaacgcgactttcccacatgatgcattttgtacactgccagaagcaaaatggaagatttggctctagcccttcaccggagatggtagactcctatgtgatcagtttacaaactttgcttctggcatactcctaaattaaagagttggttatggagactctacaatcagattttaccatgactgagacagtattttgaaaacaattatttgatgcttctgttcttgtctcccacaagttatcttcctgggaagccattatactatatatctagggaaacagtgtgaatagatgcttccaagggaaggagatgccagaacatgagcagtgagcaagacaaccagcgacactctaactgcagaggccagagaacctctgtgggcagcaccggtccccactgcgaatccacagagaacttctggactttccttcacccagatgaggttttaatcagcttctgaaacaattcctttgcagggaaggaagggtggtaggagaaaaggtagagaacagaaaaataaaatctgtctttataacatactttggctaaataattttaaggacatctccttttaaatcaacaaaatcttcatacttcaggccaagaaatttataaaataattttcatatgttccttaggcatatttttcctgtctggaaattcaacttaggtacttttatatcttccttgtttcttcttaacgtaatgtgtaagtctatatgtaagtactatatacacatataagttctaaatgtatgctcatagaaatacaaatactgtatgtaagtatatataatactatgtataactgctatacttattataagtactacttaaatatagtttccttaccccatttttaacagtcattgattaaccaattgaagattatcctatagtttatttttttcattaccttcaatgtaatgatgccattctagttttataaaaccaggtgacaatattacattctctaaaatttctttagacaaatactgaatggggacaaatactgaatggggaaaaactgaaagcttttcctctaagatctggaacactacaaggatgcccactgtcaccactgttattcaacatagtattggaagtcctagctagagcaatcagacaagaggagaaataaaggacatctaaattggaaagaaagaagttaaattatccttgtttgcagatgacatgattttataattggaaaaacctaaacactccaccaaaaaaactactagaactgataaaacaaattcagtaaagttgcaggatacaaaaatcaacatacaaaaatcagtagcatttctatatgctaagagtgaacaatctaaaaaagaaataaaaaaagtaattccatttaaaatagctacaaataaaataaaataaaataccttgaaattaaccaaagaaatgaaatatctctacaatgaaaactataaaacattgatgaaaacaactgaagaggacacacaaaaatcggaaagacattctatgttcatgaattggaagaatcaatctacagatttaatttaattctgaccaaaataccaatgacatacttcacagaaatagaaaaaagtcccaaaatttacatagaatcacacaagacccagagtcgtcaaagatgtcctaaacaaaaagaataaaactggaggaatcatattacctgtcttcaaattatactagagagttatagtatactggcatggtactggcataaaaacagacacatagaccagtggaatagaatagaggacccagaaataagtccatacatctgtaataaactcacttttgataagggtgccaagaacatacactggggaaagggtggtctcttcaaaatattgtggtgggaaaattggatatttatatgcagaagaaagaaactagacccccatctctcaccctacacacaaaccaaatcaaaatggattcaagacttaaatctatgacctaaacctatgaaactactacaaggaaacattggggaaactctccaggacattggactaggcaaagatttcttaagtagtatcctacaagcacaggtgagcaaataaaaaatggacaaatgggatcacatcaagctaaaaagttctgcacagcaaaggaaacaatcaacaaagtgaagagaagacctacagaagaagataaaatatttgcaaagtatctatctgacaagggtttagtaaccagaatatataaggagctccaacaattttatatgaaaaaaatctaataacctagtttaaaaatgagcaaaagatctgaatagacatttaaaaagaagacatacaaatggtgaacaggtgtatgaaaaggtgctcagcatcactgaccattagataaatgcaaatcaaaactacaaggagatatcatctcgccctagttaaaatggcttttatcgaaaagacaggcagtaacaaatgctggcaaggatgtggagaaaaaaagaaccctggtacactgttggtaagaatgtaaattagcacaataactacagagaacagtttggaggttcctcaaaaaaattaaaaatagagctaccatgtgatccagcaatcccacagctaggtatttactctaaagaaagaaaatcagtatatctaatagatacttgcactcccacgtttattgcagcattattcacaatagccaagattttggtgcaacctgagtgtccatcaacagatgaatgaataaagaaaatgtggtacatatacacaatggagtactatttagccataaaaaagaaagagatcctgtcatttgcaacaacatggatgaaactgaaggtcatggtgttaagtgaagtaagccaggcacagaaggacaaacatcacatgttcacaattatttgtggaagctaaaaatctaaaaaaaaaaaaaaaattgagcccatggaaatagtaaaacaatggttaccagagactgggaagagtagtgagaatgggggttggaggaaaggtggaggtgattaatggttccaaaaaaatagaaagaatcaagaagacgttttatttgctagcacaacagggtgactatagccaaaagtaatttaattgtacatttaaaaatacctgaaagagtataattggattgtttgtaacacaaaggataagtgcttgagaaaatggagaccccatttacgttcatgtgattattacacattgcatgcctgtatcaaaatagttcatgtaactcataaatatatatacctactatgtacccatattttttaaaaagatcttttagataattccttaataatgcacttttgaaaatcagtaatttgtgggaagttatattcttcaaagattcatgcattgaaacttggctacaagtacattttaagaagaaaagacttattaatgtctttaacttatattatcccgttttggctatgtgtagtacatagtttgtgctatttctcttttccctttacaaccagcctaagggtgatattaacatgaaagttttataattttctgtttcccttttctgtactatcttctggcatgctttagctcatatgattacatttttaaacattacaaatctgtagagcttgtagcactggtgttacttctttcttaaagaactgagatttgcaaaagtttcattgcaaagaaatggacttggacggctatggaaaatgtccagcaatgcagtctagagctttttgattaaatcacaagcaaaataagtgaagcagatcatataaaggaggaggatcacacatatctaaattattttatttagtttatcatgacaaagtttctgataaaactctagagcagatttaataacatattaataagtgatgacaaatggttcattaaatcatcttctcacactgcttacaggcataatggtcatgactgtatttgtgcactttagtcccataagagtgagtggaagaagtgggggaggctatgaaagtctctgagattcaggtctgtggattaaaaattatcacaagccatattttctgatggttttgattctaatagagtaattgcaacagaggaaaataacctagaggtaccctatgcaaactttttcattgaaacaaaaatgtctaagaataggcagaagatgaagctgtcgactgaacaactaaagatatgtttgtctcattttttaattttaaaaatttatataaaatttgccttcctaatataatcatatgagttttaatataaatataacactaaaattagttattgatacaattatataactattcccctaaaaattttgcagtaaaatttgtttgtcaggaagatataccatatgtattttctactgtttacatatcttgtggcacatcaaaagggatgtcaaccacaatgctaaggcaccaaacaacactgttgcttacgttgtttttaggaggacttgaccttagttataaatttagggctacactgacacagcaaaataaactaaaggcactgcaattgtctatttcattcaggaaaataactgaacaacagacgaatgaggcagtcttaagtttcatttccataaattataattgtatttctaaattatgttatgtagggtttcttcacatcttgttacatgaattctacagggacaagaattgttagttatttggtgttttaacattttaacatgcggcacagctcctggcatataaaaggagaccagtaaataaatgttaaataaatgaacggataagtgaattacctatgtaggatgtactctaattgtagtgatttcttatgttagttttaattagctacaaaaatatagactacttttgaatagtatcaaaagtaaaaatgaggtttgagatttcagatatattttagagattcacaaaaatatgctaatatagtttcatagcatatagctattgaacactaagagaaaaaatggtatttagatgagggagaatgttcaattaaaatgctaaattaattttacttttagataagaaaatgttgaaatataggctttcagaataaataggactgtggtttcctagtagttaaattcatgcccaaatatatgcttcctgtttttttcatgaatagtactaaatgcaggcattactccagagattgtcttctatgaccttattcttaattactcttcatatttttcttctattcttcattgtgcattatcctcaagagttggtgcagttcttaagtagttgtaaatctttaataactggactctaaaggttttaattatctccttactgtgcttgcctaaaataggtaactcctggctgggtgcagtggctcatgcctgtaatcccagcactttggcaggctgagatggttggatcatttgaggttaggagtttgagaccagccttgccaacatggtgaaacccaacctctactaaacatacaaaaattagtcagatgtggtggggggcacccagctactcgggaggctgaggcaggagaatcccctgaacctgggaggcggaggttgcagtgagcagagatcgtgccactgcactccagcctgagtgacagagtgagactctgtcttaaaaaataataataataaaataaaataaaaataaaaataaaaaggtaactcctaactttaaatatagcttaaattaaggcagaggaagtaaagtttgaagtaaatatcttttgttaagttaattttactttaacaatctccagctattatctaattatagaaggttgcttgaaagggaaacttactaatatctgacataataaggtacgttcttcatgttcagtgttctagtgaaaagaatcttccaagtaaatgtatccacagtgttttgagttcaccagtgttttggattcactgaactagcacatttttactacaaaagagagtttccttcaaagaaaattaactatcccaccaaagcttcatttgaatacaaattttaaagttgatgcaaatggagcgccaatacacttggggtttttgtggggctttgaaaacatatggttcatcttgatgttaaaaataatacacttctctctatgttaaatcttgatagggcatgaattaatgaaatagaagaaaatgataatatattaagcctacattgatcctatagaaaatattaatccatgtttaaaagtacatcaagatacttccaaaaaactggagtaaacatatttttcctatcccttccattaagtaaaactaaaaaccttggacattatatataaaacaaaaatgaagagaccagctagggctcttgggatccaagcagtgacaaagtggtgaattcctgggtttttttttctgcctcttatatatgaatccatttaaaatgttattgaaatgacacagtattgaaatgaagaactcattagtggttgccagggcccaaggagtgcaaagggcggagcagaggaaagtgggtgtggctataaaagggcaagagagatgcaatggctaactttttgtgccaactacaactatctgatctttgacaaacctgagaaaaacaagcaatggggaaaggattccctatttaataaatggtgctgggaaaactggctagccatatgtaggaagctgaaactggatcccttccttacatcttatacaaaaatcaattcaagatggattaaagatttaaacgttagacctaaaaccataaaaaccctagaagaaaacctaggcattaccattcaggacataggcatgggcaaggacttcatgtccaaaacaccaaaagcaatggcaacaaaagacaaaattgacaaatgggatctaattaaactaaagagcttctgcacagcaaaagaaactaccatcagagtgaacaggcaacctacaaaatgggagaaaattttcgcaacctactcatctgacaaagggctaatatccagaatctacaatgaactcaaacaaatttacaagaagaaaacaaacaaccccatcaaaatgtgggcaaagaacctgaaaagacacttctcaaaagaagacatttatgcagccaaaaaacacatgaaaaaatgctcaccatcactggccatcagagaaatgcaaatcaaaaccactatgagataccatctcacaccagttagaatggcaatcattaaaaagtcaggaaacaacaggtgctggagagcatgtggagaaataggaacacttttacactgttggtgggactgtaaactagttcaaccattgtggaagtcagtgtggcgattcctcagggatctagaactagaaataccatttgacccagccatcccattactgggtatatacccaaatgactataaatcatgctgctataaagacacatgcacacttatgtttactgcggcattattcacaatagcaaagacttggaaccaacccaaatgtccaacaatgatagactggattaagaaaatgtggcacatatacaccatggaatactatgcagccataaaaaatgatgagttcatgtcctttgtagagacatggatgaaattggaaatcatcattctcagtgaactatcacaagaacaaaaaaccaaacaccgcatattctcactcataggtgggagttgaacaatgagatcacatggacacagaaaggggaatatcacactctggggactgtggtggggtggggggaggggggagggatagcattgggagatatacctaatgctagatgacgagttaatgggtgcagcgcaccagcatggcacatgtatacatatgtaactaacctgcacaatgtgcacatgtaccctaaaacttaaagtataataataataaaaaaaaagacttgcctagatagctggtaaaacattatttctgagtatatctctgagagtgtttcaggaaaaaaatatatcatttgaaagagtagactgagtaaagaagatgcatcattagcagtgtgggtaggcaccatctgattcattgagggccctgatagaacaaaaaggagaaggaaggaaaacttctcttactctcttgagctgggggatatccctcttctcttgcccttagatatcatagcttctggttctctggccttcatattctgggacttatgtcatcattacccttggttctcaggttttctcactttgaactgaattgccccaccagctttcctggttctccgatttgcagatggcatattgtaggatgtctcagcctccacaattgcctgagccaatttctataatagatctttccttatctctatatttttccagacagatgataatctgtctgtctatttatcacattggttctgcttctctggagatcctgaataatacaatgaaagatctttgtgatgatgaaaatgttctgtacttgaactgtatcagcgttaataccctagttatgatattgtaatatagttttgcaatttcttacttttggaaaaaaacagggtaacggtttcaggggatctttctgggtaatttcttacaattataggtgaatctagacttatactaaaatttaaaaatgtaatttaaaaaactgtcagacacagtataagacagatcatcaaggcagaaaactaacaaagataggcaggaactgaacttgacatttgaacaagtggacctaacagacatctacagaactctcccccaaaaccaatagaatatacattcttctcatctgcgcatggtatatactctaagagcaaccgcataatttgtcataaaacaattttcagcaaattcaaaaacactgaaatcacaccaaccatacactcagaccacagcactataaaagtagaaatcaatagtaaggagattgctcagaatcacacatttacatggaaattaaacaagacctctgggtagacaataaaattaaggcagaaatctgaaaattctttgaaatgaatgagagcaaatataaatctgggacacagctaaagcagtgttaaaaagaaactatggtgctaagtgtccacatcaaaaatttagaaagatttcaaactaacaacctaatattaaacctagaggaactagaaaaacaagaacaaaccaacctcaaagctagcagaagacaaaaaataaccaaaatcacagctgaacagaataaaattgagatgtgaaaaagcatacaaaagatcaatgaaaccagaactttgttctttgaaagaataaataagattgatagactgctacctagagaaataaacaaagagatatcaaaataagcacaataagaaatgacaaagaggatattaccactgatcctacagaaatacaaaacaccctcagagactattatgaacacctctacgcacacaaactagaaaacctacaagaaatggataaatttatgataacgtacaacctcctaagattaaacccagaagaaattgaaatcttgaacagcacaataacgtgttcttgaaattgaatcagtaataaaaagccttcaaaccagtaaaagcccaggaccagaagaattcatggccaaattctaccagacgtataaagagagctggtaccattcctactgaaactattccaaaacattgaagaggagggactcatccctagttcattctatgaggccagcgttattataataccaaaacctggcagagacacacaacaaatgtaaacttcaggccaatattcttgatgaacatagatgcaaaaatcctcaacaaaatactaacaaaccaaatccagcagcatatcaaaaagctaatctaccatgatcaagcagagtttatctctgggatgcaagtttgattcaacatatgcaaacaataaatcaataaatgtgactcatcacataaacagaactaaaaacaaaagccacctaattgtctcaatagatgcagaaaaggcttttgataatgttcagtatcctctcatgttaaaaaccgtcaacaaactagccattgaatgaacaactctcaaaataataagaaccgtttatgaaaaacccaaagataacatcatgctgaacaggcaaaagctgcaggcatttcctttgtgaactggaacaggacaagaatgccctctctcaccactcctattcaacatagtcctagccagaccaatcagggaagagaaagaaataaaaagcatccaaatgggaagagaggaagtcaaactatctctgtttgcagatgatatgattttatacctagaaaatcccatagtctctgcccaaaagctgctcgatctgatgaacaacttcagcaaagtttgaggatacaaaagaaatgtacacaaatcagtagtatttctatacaccaacaacatccaagctagatgccaaatcaagaatgcaatcccattcacaacagccacaacaacaataaaaaatacctaggaatatattaaccaaggagatgaaagacctctacaatgagaataacacaacactgctgaaagaaatcagagatgacataaacaagcagaaaaatatttcatgctcatgaatagaaagaaccaatattgttaaaatggccatactgcccaaagcaatttacagattcaatgctattcctttcaaactaccaatgacattctttatagaattagaaaaaaaaaactattctaaaattcatatagaaccaaaaaaagaccctgaatagccaaagaaatcctaagcaagaagaaaaaacctggagacattacattaccagagttgaaactatactacaaggctatagtaaccaaaatagcatggtactggtacaaaaacagacacatggatgaatggaacagaatagaaagcccagaaataaagctgcacacctgcaaccatctgatatctgacaaagttgacaaaaacaagcaatggaaaaaggactttctatttaataaacagtgctaggataactggctagccatatgcagaagattgaaattgaaccccttccttataccatatacaaaaatcaacccaagatggattaagacttaaatgcaaaacctaaaactgtgaaaacccttgaaggaaacctaggaaataccctttaattttctttaagatttatagtatataatttggccaaactcttaaaggccttcaaatctcaagtctcagttccctactatcttaaccaatttccttctggaaatagattgaagtcatctataaagagttcacacagaatcagtccattaaaataaagataaaaaccacaagttgtataataaaggcagaggaaaatgggaaagaaagtattactttttaaaaaatcaaagtcttttgggggagtgggttggtaaaattgaaaaaataatctcagctttcttgtatatttagcaaaaaggacactgtgatggattatattaacttctacagtgaaataaaagtgaatactactagtagatcattaggacagagaaactttatgctaggactaaattctgagaacaatttactgtgtggctcttaactagtgatctttaacaataaaattaatttttacaattatgtgtttatagaaactgcacattgtaaaccatgtggctggttaaaaaaataataatcaaaaccagaacaaaaacaaaatactgatatacatatatatgtatatccaaacaccatgttatgtaccttaaatatatataataaaaataaatttaaaaacaaataaaaattccccaaaactaaagaggcttaagtaaataataagcccattacatcgagttctggtccaggagatttttgacattgtaggtaaagagtatttagaccacatcacagactcagggtatcaggctgtctggtcgtaaacttgaactcacatctaaacattccatgccagcctctgcagtcaggcagacgtcctgatctacctctctgcctagaggtgtaggtccagagtggatctaactgagttccttgctctgccacttgctggctatgtgatcttgaaaaacttgcttaattttttctgagtctttgttgcctcatctgtatggacatggaaataattgcattatatacctcagaaattggtgaggattgatgtaatttatacctatacagttcacaaaacagtgccaagtacatcatgaacattcagcaagtgttttccattatcatctcgtctgtattagcgctgtgtggaagaatctttattaacctttatatgattaaacaaataccctagagaaagagcctgctcaccaaaacatatgttctccttttctgtctaagcgtcagctgaaccctgtttcccagttctgtctgagactctgttggccaataaaatgtgagagggagtggcatgtgccatttcaggcctgactcattaaaatcctcccacatgtgctcttccgtgttcctggccctctggaatgctgatggcagagaacatggaagccacatgtgaaagatggcagaaactctgtcaacctggccaccacacccaactgtttggctacctgattagttgtgtcaggttgcaagaaaccagctactgttggataagttccacaatgcatgccttgggtctgctataagcagtttatacaacactgatgttgtggtgaagagctttaaaaatcgtgcaagtgaaaaacatctcaatccaagtaaatgcctctgtcttggggtatttgtccatttgtcctctattttgggccttacatataaatcctatttgtttgctctgttcatgacatctctatatgcatggcaaggctctcctacttagtgatctgatcggattccagctgtatcttagttttaattctattaaatatgatcacctatcatttttggtttaatcccaggactcttcaaagcaaaatggcatttgctgcctagcctcagttttatgtaagagcatctcaaacaccaaacactacctccaaaatttgtttagcatttttcaaatgatttgatgacaacagaggcatgcatatgtttgtgactttcctaagtcatatagcacaaggctggctgaactcaataaaatgtaagttcatagattaattgagcaaagtctaccctactcacacctgccagagctgaagtaaggcattctcctgggtaacagaggaagatcataggttggaaaaggcaagtattcctgagggatcactactctttcttcttggaaggaaacttatctgcttatccatgtcccttgattttctgctttgttcattcaacaggcctggctttatttgaggtgataggagaatcaagatgtatcattgcacacaacattctcaggagagtcaccaatgcacctgccctttttgtgtttttactgaggaagctctgcataagccactttatggagcattcctgtttgggactggaattttggaataagaaaaaatatataagacaagacctcagaagcacatggagtgggcaaaattcagttccaatgtaggaaaaaaacaaaaacaacctttggtcagggtcagaagtggatcttttcttttttttttttttttttttttttttgagacggagtctcgctctgtcgcccaggccggactgcggactgcagtggcgcaatctcggctcactgcaagctccgcttcccgggttcacgccattctcctgcctcagcctccccagtagctgggactacaggcgcccgccaccgcgcccggctaattttttgtatttttagtagagacggggtttcaccttgttagccaggatggtctcgatctcctgacctcatgatccacccgcctcggcctcccaaagtggccctaggactgtttctactaacgactcagtccaacctggaatggggtgaattctgcaccctcactggggactctgggattgctggagtggtctcaacatgataatatcttggtcaatagaagcttgttccattgccagtgctttatgcaagatgaaccagcactagcagccaaagaaagtaaagattgagcaacagcccctttccttttctgtcccaacttcccttcagagcagctgcatccaagtcccagcagatgttagtgtatgtgggatgaccttgcagatggctgcatcagggcaaatttctgagttcatgagtttctctctctgtcccttccctctccatccctggtagctgacggtgctggagagaaagagaagttttcagtggtaagggcaaaacaagaaacaagtcatgagtttgctatttttggatgagttattgctgcatcacacattgttcttagtagtctcagtatgacacagcaatttttcatcacttaaatgcagttttagaatttttaataacactttaaattgctaatcataagactgaaacttgatgtcttctaatccggcaaaatacattagtcacttaccagctctgtagtagctttttaaaaaattcaggatcttggtcatgagggcttaggatccaaatcaattgctatataaatccttttggaaatgtattcagtgctataactacacgtgcactaccatattctagtattgtctttttagttccaaaatttagttgttatagaaatcaaagatagttgttcccagagtgtccaaaccatctaggccaactgtaattgaagaaagacaatattgtttgcagtctcagtatgaatgtggattccttctcaaataatcatttgcgcttacctcttgggctttgtctgaagaaaataaaagcaatatcacaaagtatgctgtacaaacatgtgcatctcaacattgtttaaaataggactcattggaaaaaatctaagtaccctacaatgtaatactggttaaaagaattagattcataaaatgggatgcacgggaccaatttgaaacaatatttactgatatgaaatcatactttaaaagcaccttaaaggaagagaataatagcaaaccaaaactatataattaatttgtcaaaataacatatacatacatagaaagtttattaacatataattatatattcattaaaagtcatctatattatcatagaaaaatactatctctaccttaacaataatgattacttcatggtagaattacagacttttttttcttacatgtggcatgtgtgtgtgtttatggatatgtattgcttgtgtcataataatagagttatattaaaatattatagattttagggtaaaagggcagaataaagccagagtacagaagtcctctcacccagtaggtaatacagtgaatcaaatattatataaataagtgaaagtgttacaaagttcacccaacaacaaaacaagaaaagaggaggaaccacatgtcaccaagttcaaaatgtggtgatcgaggcaaactgtctggcatggagctgaatatggagactcctatctttactcccatattacagtagcagaattggagagataaaatgctcagtgttcttatttaaaattgtacctaccaccaccaggttagaaaggagcatgcaagctgaagctgagaggataagagagttcttccaggatgagtcaaggaaaaatccagtagagaaaaggccacaccaacagaggcaatagaaatggaccagagaaaatcctctggagaggactgacattttccaggacttcctgatgaatttcagaaaaaattcaaagtcccagtagattctcttttaggactaaaattctttcccaaataagtgaagtgacctcctctgagggacgcacatagactctaatgagctcttccccacttccattttcctcctacagacacttaaccactgccatcaggttacagaaaagtggatgaaacagctaatttgagccttcaagggggccaagtggctgaaagaaatagatttgcatgagttactcatctcaaccagaaagaaaatgcaaagaattggcgtggaaattgtgacaatataccacatttaaaaaataaaaatcccttaagactagttctggaaggaaacataccacaaggaacaaatgaaatttcctttcaaattcagcccacaataaaagagtttagttattattataagttgactaatacaagaaatcattggtgaattaagaatgcaaataacattattacagaaacagtatcttaaaaataacacccagggacagaataaatggttgaatatcaaattacttttccagagagacttgagataattagaggaattgctaagaaaaagtcaataaaaattatggagataataataaaatttgatttcaaagatagtccaaaataaatcaataaaaatgtaattggacatttaaaaataattaaaagggtataactggatagtttgtaaaacgaaggataaatgcttgaggcaatggataccccattcaccctgaggtgattttacacattatatgactatatcaaggtatctcatgtagctcataaatacatacacctatgtctccacaaaaattaaaaattaaacaaaaatgaaaaccagtgtccatgaaacaggaaattcagtaagtaaaacagaaaaagtattgaaaggaataatggaataacacttttttctgaaacatatattgacatctagagtttttaatgaagggtagtgtgtttaaggaaacacattatcatcatcatcatcaagcaaccaacactgaaaaatagcacgtttaacttgttgaacttcaagaatagaggagtaaattttcaggtaacagaaaagaaagccacgtctaaggtgtaaaaacaaaatatgttggggtttggtttcttaatgctaacattaaatgccagaaaacaatggaaaattctaccccttggtctctggccatgaacctcccacagaaaaatgatgatatttgttataacatttacatttggtgcagcatttatggcatgtatatagcaatagcaccaacacaaatatgcctaacatttggagaagccagtacggggatagatttaaagaaacaactgatttgtcctgtaaacccattatgcacttttttatatccttgtgttaattttattattctttccccccttgacctactgttatttgtgtcttatgataagcttgtgaagaactgtttaacacagaattcagaggatgattagccagatccagttcttcctcaggctagtagttattgtgcataaaataaaaatggtaatacataagctgtatgtcctgaaggagctttaagtcaatctcccaatacattttataatcaatattagtattgtcataagtcttattacttagtgtaattgaatcttaccaacaatgccagtattacacaatattatagtatgaacatggtataattcagtttcattacagaatacacaacaaagtagtaagaattacagaggtatttgctttgccttcccaacagaatctacaactgaggacaaagccaatcatctcatctcaccttacaggctcaaatctagactggtttccattgtgtgttgttattatgtaacagggctctcttccctccaatggggaagtcatgagtagtatttagcaaactattctgggggccagaactgtcacaagacatcagtgtaaatcaaaagtgcctccaaagaattttacatgtttggggagtcataagattcccataggtgtgccccttgagcttcaggagctagaatagagggccactgacttatgcccacttcagcttccatgtgtattaaaataattgaggccctattgggtccaggcacaaatcctttcccagtactgggttttagcagtaccctacgttatttattgagtcttcgtgacccactttgctaaagcctcattatatttccagggctaactcccatcatttgccctcctcgtggaagagaaccctctctattctagttttcctctgactgccactcctcattaaaagcaaacacagcttgtctcaggataactagactgacacttatcacaccagtgcagttaggatacatgtcttacacccccagatgttgggtcttctgtactagagttagatgagaggtagtcactccttgatgtactttggtttgagtgtgccatgaggcctcccacagcgtttcttgtctctgggtgggactgttccctaagggatccaccaggtgatgctcactgctttaatcccatcagggacccattgtatttctctattttacttggtagttttacatctacaaaacaaggatgatgtacatttgtgcatagcacacagtgacatgttgggctggctgctgttacgatttgcccattttaatcagatacatttctaggcatttggttacacagcgatcagtctgttgggagctacaacatcacagagtttgaagtcccagtaggaagaagttctcagaaattccctcccaaataatgtctaccttttgaggtacaggtagcctgagaagtaggagtccaaggcattggcatattattaaagtttcatttagttattaacagcttgtccagtttcccatcatatcgtatgaccagaatgtctcttagtgatgtcagtcaggtttgtagactgctgttcaaccttgccagtttccaaaaactaggccttggcaaacatatagcttcattttcttggacatctggtataattgtgctgaaatacaatattattctcttgctctgagcttcataatgttggatttctctggttgcataacccaattatttattcttttactccaaactactatttctccctctcctcatgtgttatttatttttatccacactttttctaatatccttgggagaggacattaggtttggccactatgctggcccagattgctagtagcagtaccagtgtagcaagggcttctccatcagtctacccccaaccatatggggcagggttacataggtatggaattagtgagatatacctgaccacttggcatcacagtaacattcactgttaaccccaactttgccagatggggtgaaggcacaatctactctattaggcccttaggaattttgacacaatggtctaaaggtatattacagcttcttgcttaaaatgcaaccctgcttctggcacccacagttgcattcctgtccctgggatgactgataccaaattttgaagaagaaatgtgacttaaaatagtgtaagtagataacttgtcaactgaaatataaaggcaattgtcagacaatttcaacatacaaataaaaggaagaaaagaatatctataatttttctccaaaaatacttgatgacaaagagcagccaacagaaatataagtggaaaagattcaaggaaaggagcacacagtactaagagacaatggagagccatgtctgcaaaattctctgggaaaggaagttatactaaaaaacaaatggttctttgatatatcgtcaaagctagacatttacaagaaacattaccttgctgcatgagatgggtgtgagcctttctaaaaaaaaaaaaaaaggaaaaaaagaacacaactgatgatggaatcaagcccaccaagaagtaaatatctttaaaaaatcagggatggagaggctgatgctgatgtaaaaggagtggtggtgataattgagaacatttaagtatagaataaagattaatggtgggaaatatattaacgagatagaatgtaagtgttatgaaccttgacacattttaaagcaacagtatagctgacaaaatcttgaagaatggaggctcaaataaatggggagccaacataccatagcacatttgttacagtatggactctggatccagaccacctctctttgattctctactctgtcattttttttttaacttttattttaagttcaggggtacatatgcaggtttgttacataggtaaacttgtgtcatgggagtttgttgtacagattatttcatcacccagttattaagcctagtaaccattagttatttttcctaatcctctccctcctcccaacctccaccctccaaaaatctccagtgtgtgttgttcccctctatgtgtccatgtgttctcatcatttagctcccatatataagtgagaaaatgtggtatttggttttctgttcctgcgtcagtttcctcaggataatggctgttttctagctttgaatttgtcagaaagtcagttaatctttctgtacctcagtttcatatttttcccaagactggagaaaatcttgcccaaaaagatcatggtgatgatcttcaaaattttgtcattctttgactcattctctgacctaccttctcaaccactacacttggatatcaagaattcagataacactcaacatgttcactagcaacctctagaatttacccctcaaacctaatcctctgcatatctgtaaatgtaggccaaatttttttgtaattatgcttggcctttttgtctttctcaaacatctcacatctaatccatcagcaaattctgtcagctctactttcaaaacacatctaaaacccaactgcttctcaccatcttaactgctagcacccaagtcccagtctccctcacctttcccatgtgagtgtggtagccctaactggtctccacacttcctcacttgcttccattttagtctagtctcaatccattagttaaaatgcttactataaaaagtcaggtaatttcattctgttgcgctaaatggcttcccatctcactcagaataaaatccaaagtcaatactacagccacgatacctccataattgttctgactcacctgccctctgtctgttctgcttattgctctctagccacactggcctttttctgattctgaaacatgttgaagcgtttccactagctgctccaccagcctgaaatgatcttccagatatctaaatagcatcatgatcacatttcattcacatgtctgctcagattacatttactcagaaaggtttttttttaatttttaatttttgtgagtatataataggtacatactcacaaaagtaggtatatacttatggggtacaagagatattttgatacaggcatacattgtgtaatagtcatatcagggtaaacggggtataatctcctctagcatttattctttctttgtgttaaaaacaatccaatggcaatcctttagttactttaaaatgttaaataaattaatttgactgtaatcatcctgctgcgctatgaaatactaaatcttactaatcctaactatatttttgtacccattaaccatcccccattcccctgtactgccctttccagatgctggtaaacattactctattctttatctccatgagtttaactgttttaatttttagctcccacaaataagtgtgaacatatgaagtttgtctttctgagcctggcttatttcacataacataaagacctccagttccaaccattttattgcaaatgacaggatctcattatttttgatggctaaacaacactccattgtggtacatgtaccacattttctttatccatttgtctgttgatggacacttagattgcttccaaatcttggctatggtgaacagtgccgcaataaacgtgggagtgcagatatctctttgatagactgatttcctttcttttgagtatatacctagcagtaggatttctggatcataaggtagctctatttttaattatttttaggagcctccaaaatgttcttcatagtgattgtactaatttatattcctaccaacagtgtgtgagttctttttctccacattcttgccagtatttgttattgtctgtcttttggataaaagccataactagggtaagatgatatctcattgaggttttgatttgcatttttgtgatggttaatgatgttgagcactttttcgtatacctgtttgtcatttgtatgtcttcttttgagaaatagttattcatatttttgcccatttttaaaattgaattattagatttttttcctatagaattgtcagcttttcatatattctagttattcatctattgtcaagtagatagttttagaatattctttcccattatatggattgtctctttattgattatttcctttgctgtgaagaagctttttagcttgatgtgatccaatttgtccattttttctttggctggctgtgtttgtggggtattactcaagaaatctttgtccagtcccatgtctggagagagtcctcaatggtttcttgtagtagcttcatagtgtgagatcttagatttaagtctttaatccattttgatttgatttttgtacaggtcaagaagtgaggtctagtttcattcttctgcatctagatatccgcttttcccagcactatttattaaagagactgtcttttccccaatatatgtcttttcttttggcacctttataaaaaatgagttcattgtaggtgtatgcatttatttctgggttctctattatgttccattggcctatgtgtctgtttttatgccagaaccatgccattttgtttactataattttgtactataatttgaagtcaggtaatgtgattagttcagttttttttttttttttttttctcaagataggtttggctattctgggtcttctgtggttccatataaattttaggattgttttttccatttctccaaagaatgtcattgctattttgatagagattgctttaaacctgtagactgctttaggtagtatggatattttaacaatattgattcttcaaatccatgaacatgaaaaacctttccatttttttgtgtcctcttcaatttctttcattaatgttttatagttttcattggaaagatcttttacttccttggctaagtttattcctaggtattttattttatttgtaactattgtaaatggggttcctttcttgatttcttttttttgattgtttgctgttaacatatagaaatactactaatttttttatctatattgatttggtatccagcaactttactaaatttgtttattagttctaatagttttttggtagagtatttaggtttttccaaatataagatcatatagtctataaacaaggataatttgacttctccttttccaatttggatgccctttatttctttctcttgtcttgttgctctacctaggacttctagtagtatgttaaataatggtggtaaaagtgatcatccttgtcatgttctggatcttagaggaaagggttttagttttcccccatttagtatgatgctaacagtaggtctgtcatatttggcttttattgtgttgaggtatgttccttctatacccagtttattggtgacttttttatcctaaggggatattgagttttatcaaatgttttcttagcatcagttgaaatgttcatatggcttttgtccttcgttctgctggtatgatgtatcacattgattgatttacatatgttgaaccatccttgcatccctgggattaatcttgctgggtcatgataaatgatctgtttaatgtgttttggaattcagtttcctaatattttgttgaggatgtttacatcagtgttcatcagggatattgacctagttttcttttattgagatgtctttgtctgttttggtgtcaaggtaatactggcctcatagaatgagtttggaagtatcccctcctctatttttcagaataatttgagtgggattggtattagttcttcttttaatgtttggtaaaatttagcagtgaagccactgggtcctgggcttctctttgctgagtaactttttattacatcttcaatattgttatttattattgcactgctccagttttgaatttcttcatggttcagtcttggtaggttgtatgtgtctaggaatttatctatttcttttaggttttccaatttattgccatatagttgttcatagtagcctctagtgatcctttgaatttctgcagcatcacttggaatgtctcttttttcatccctgattttatttattttggtcttctttttttctttgtctagctgaaggtttgtcagttttgtcaaccttctcaaaaaaaaaagaaaactttttgtttcattgatctttgttttttttttcttcatttcaatttcttttattctgcgtcaatctttattatttattttcttgtactagttttgggtttggtttgctcttgtttttctagttctttaagatgcccaattaggttgtttatatgaagtctttacttttttgatgtaggagcttatagctataaactttcctcttagtactgcttttgatgcatctcatagctcttacatcatgtttccattattatttgtttcaagaaattttaaagtttctttattgaccactggtactttaggagtatattatttaatttccatgtgtttgtatggttttcaaaattcctcttgctatcgatttctagtttcattttattgtggtcagagaaggcacttgatagaatttcattttttttttgaatgtttaaagatttgttttgtggcctaatatatggtccatcctttagaatgatccatgaactgaagagaagaatgtatattctgcagctcctggatgaaatgtcttgtaaatacctattagatccatttagtttatagcacagattaagtctgatgtttgttgatgatctgtctggataatctgtccaaagctgaaagtatgtcgtcaaagtctctagctaatattatattggtctctctctacctctaataacattttcttttatatatgggtgctccagtgatgtatatatatatttacaattggtatattctcttgctgattggatctctttgtcattatatagtgactttgtctcttttcatagtttttgttttgaagtctattttgcctgacataagtgtagctactcctgctcttttctggtttccatttgcttggattatttcttttcatgcctttatttttggtctacttatgtctgtaggtaagtgtgtttcttgtaggcaacaaatcattgggtctttttcaaaaatccatttagccactctatgttttttgattggatagtttagtttagtccatttacattattattattgataagtagaacttactcctgccattttgttatttgttttctgattgttttgtgatcttctcttccttctttccttcttcctgtcttccttctatttaaggtgttttttgctggtggtatgttttaatttcttgctttttattttttttgtgtatatgttgtgttttttgacttggggctaccatgaggcttccaaatactatcttataacctattattttaaatttatgacaatgctattgcataagtaaacaaataagcaaagaaaaactaataaaacctctacactttaaattcatcccctgctttttaagtttttgttgtttctatttacatattattgcactctgtatgtcatgaaaagtgattttagttatttttgatcagttcatctcttagtctttctactcaaattatgagtagtttatataccatgattacggtgttataatattctgtttttttatacgtacttggtattaacagcaaaaagtattgcatattcacatgatttcttttttttttttttttttttgagttggagtttagctgttgtttcacaggctggagtgcaatggcgcgatctaggctcaccgcaacctccacctcccaggttcaagtgattctcctgcctcagcttcccgagtagctgggattacaggcatgtgccaccatgcccagctaattttgtatttttagtagagatggggtttctccatgttggtcagactggtcttgaactcccaacctcaggtgatccatctaccttggccccccaaactgctgggattacagccatgaaccgctgcacctggccattcacatgatttcttattgatcattaacatacttttctttcagattgaagaacttcctttaccatgtttttgcaggacatgtctggtgttaatgagattcctcagcttttgtttgcttgggaaagtttttatttctgcttcatgttttgaaggatattttcacaggatatacttttctaggatagaagttttttcattcagcactttaaatatgtcattccaatctctcctgacaataaggtttccactgaaaagtctcctgccagatatatagaaactccattgtatggtatttgtttcctttttcttggctgcttttaggatcctttctttatctttgaacttggggagtttgattattaaatgtcttgagataatctttggattaaatctgcttggtgttctataaccttcttatacttgaatattgatatctttctctaggtttggaaagttctctgttattatccctttgaataatttttttaccttgatctctcactttctatcctctttaaggcaataactcttagatttgcccttttgagactattttctagatcttgtagtcatgcttcactctttttaaattttttattttgtcttctctgactgtgcattttcagatagcctgtcttcaagctcactaattctttcttctgcttgagaattctgctattaagagactctgatgtattcttcagaatgtctattgcatttttaactccagaatttctacttgattctttttaattatttcaatcttattgttaaatttatctgataggattccaaattccttatcagtgttattttgaattgcatggcgtttgctcaagatagctattttgaattctctttctgaatggtcacatatctctgtatcttcagtattggtccctggtgccctatttagtttatttagtgaggtcatgtttcctgcatggtcttgatgctcatcagtgtgtgggccttgaacagttaagtatttatggtagtcttcacaatttgggcttgtttgtacccgtccttccccagaaggcttttcaggtattcaaagggacttgagtattgtaatctgtttttggccactgcaaatgtatatgcactaggagacatcacaagtccagtaacactattgctcttgcagacacctagaggtaccaccttggtagtcttggataagataccaaagaattatcacagagactctttttctctccttttactttctcccaaacagagtctctctttctgtgctgagctgtctggagctgtaggaggagtgacacaagcacccctgtggccaccaccactgggactgtgctgggttagatctgaagccagcacaatactgggtcttactcgaagcctacggtaatcattccctggctaccacctatgttcacgcaaggccctagggctctacaatcagtaggtggaaaagatagccaggcttgtgtctttcccttcagggtagcaagtttctcccagccaggctgagtccagacatgccatctgagagccagggctggaaagcaagtaccacctgggcactgctgatgtttgcccaaggtccaagggctcttcgatcagtttgcggtaaatgttgctaggcttggaactttcccttcagaacagtgggctcccctgtagcccagggaaggtccagaaataccatccaagagcaatggcctggaatagaggacctcaagtgctctaccccactgtgcttgggctggtacctaagctgcaaaacaaagtcccttttgctttttcttctccttttcttaagtagtaggagtttatctccatagacaccgcaatttggaatgtgttgggtcacacctgaagccagcacatgtctcagtctcatccaaggcctgcagagagtactagctaggtaccgttgttgattattgagggtctaagggctctttagtcagcatgtgatgactcctgccaagaataggttcttcttttcctgctaaggcagtggattcccttctgacccagggtttgtctagaaatgtcatctgggagctaggacctgaaatctgggcctcacaactgtgcatgttttctgattctactgtggctgagctggtatccaagttgtaagacaaagtactcttctctcttctctcctcaactggagggaagtagtctttcttggagctgtgagctgctctccctggggttggggaatgggtggcacaaagtctaccttggctaccccagttggtgtctcactagttttcatgcccctcaagtccactggctccaaccctggcacagcaccaggacttgcccagtaattgctatccttatgggccagactgcttttcaagtttctttaggatcccagagccctttagcctgagggagtggggtttcctgaaactcaggttcccaccactgggataaacaatgaccttctggctaagaatgatctaaacgctcccttcatcagcaccagttgagttctgcccagtattgttttctgctgtgacagggcatctctgagttacagtgcaaagtcccacagtcactgcattctccctccctcaagtgcacacattctctctctgtgccatatggccgctgccaggaaacaggagagatgtggtgtatcagtccattttcatattgctataaagaactgcccaattctgggtaatttaaaaaggaaatagagttaattaattcacagttcagcatggctggggagcctcaggcatcatggtggaaggctaaggggaagcaaggccccttcttcacaaggcagcaggaaggagaagtgctgagcgaagggggaagagccccttttaaaaccatcagatctcgtgagaactcactcagtatcatgagaatagcatgggggaaaccgcccccatgatccaattacctccacctggtctctcccttgacatgtggggattatgggaattataattcaagatgagatttgggtggggacacaaagcctaaccacatcaggtggtgatggcaattcaagactgtctttgctacctcttcagtgtttctctcaatgatatttaaaatcaggtactggtttcaatgatatttaaaaccagatactggattcaatgatatttaaaaccaggtgctggtttcaatgatatttaaaaccaggtgctggtttcaatgatatttaaaaccaggtgctggtttcaatgatatttaaaaccaggtgctggtttcaatgatatttaaaaccaggtactgtgattgctcacctgatttttgttttttatgaaggtgcttttttgtgtgtgggtagttgttcagtttagttttcctgagggagtgaagaatgatgaaagtttctttttcgctatcttgctccactctccatccagaaagttttttcttgattcaaaacaaaaaagcacccaattttcattctctatctttatcctacatatttatttcataaaatataccactgcttgctataatttgtatacattacatttaatatgtttatgtctctgtgttttccaaatatatattgtgcaaattacatttttatatacatctatatgtaaatgaaatatatttggtaacttatcatctctgtgagtgcacacacacacacatacacacactagaatgtaaactatgagaagaggaacttttttcttcagtgttataatacctatacttagcacagtgcctggtgtatagtgagtatcttcactaaatatttatttaaagaatattcagttaagggaaatcaaagatatccattgaatattcacatagctaataaaatacattgttaagctaatagcaactattttaaatcaaaacaataacaacagatacacagttcatcctcatagctttgtggatgtgaaaaatgagacccagagaggttaaatactttaccaagggcagtcatgaggtgtagtagggggcatggactttggaatcaggcagaaatagaattaactgtttctcggctgagtgaccttaggaaattaatttatcatcattggccctttattttctaatacgaatattttatattttaaacttgaagaatgatcaaaataattaacagcaataactaatgtgaaataaggtgttaaataggatttttccgttgctatagaattggaacaggaatccacaaatgaaaacaaagaagagttaaggaccccactgtaaagagagaaagcaatatatttcttactcccagccccagccagcactttctaaatggcagagccagcccagccaccactgacataagcatcctttacttcccagagtggtagagaggactcagaaaagggaaggccattcggggcatgggcctggagggaaatttagtgttactaatgaaagatttttaccttaccaccctgtgatggaagagaagaggttctcctacccaagtgataaaaaaagacccctcccaaatcatagacattggggatgtctgcaaggagagggaaactgacgtctactccctggctggatgctcattgagctgtgaaatctttaggccaattattttgacttggtttagctaagtagactatagtgaaggaattctgcattatctggagttgtcagttttgcatttaaggcactaaagactgctgttcttccagatattttaggagattcaaaacttgctggtgtagaccacaccagcctgagaaggatagcacgacttttctgatctccacaacacagggaagacctcaggggttcctttggctccatatgaaggagaacagagttcacaggtgattccaagttaaccaagtggccatcacacaacacaaacagtgcttaccaggagggaagggcagaaggaagcattctgctttccgagatggtcaagaaacagtgagctgtatgccatctcagaaaaaccacaaatctagtttttctagacacaatctagtttgagacggcatgtcagcagagaccaccagcatcaatggaaccagaccaaatcagagaataccagagatgctgctacaccactgatgtgggtggttataactgaagattccttcagcattgcttcttgcttggtgaaaaaaaatatatatttcttcctcctcttgtcacccttctccttttccgccctctctgctttctaccctctgcctcttcctttctctctctcctttccctactctccctcctcttccatcactattactaccattcttcttcctcttctcctccttctctccctcttccttctcctgtactctcctccctccttgtcctcctcctctctaccttcttctcctcctcctttcttcttctcatctttaattcaaatatattagaaagagagaatgtcaaagaatgatgtataaagagttgagtaaaagtttatttgcgaatgtgtgttggggctaaggagcaagacttggcagggaagaaggtggtaagaaggcagaatagacactgctgacactgcagcaagtcttatagtggatgactgtcaagccaatccaaatattttagactccagctgtatgaacagatgttcccaaattggtgaactgtttacatttaacagaggacatttaatctttcaagagactctgatctaaggttgtcttcttttaaaagttaatatgtctgtcataagactttattcctagtagcaaatatttaaagcaacactttttaaagaaagtagaaactggtatgatggtgtgtgcttgcagtgccggctactcaggagcctgatgagggagggtcacttgagcacaggattttgagtctaccctgggtaacacagtgatacctcatctcttaaacaaacagaaaaacaaaaaacgaaagtaagaaagttgtggaaaattgcaatttaaaattataatttcttagtaaacatattagagactgaagttattttgataatatttttttccaaaatcatacatgatagatgtgtcagtcagtttcacactgctataaagaacttcctgagactgggtaatttaaaaagaaaagaagtttaattgactcacagttccacatggctagggaggcctcaggaaattcacaatcatggcagaagaggaagcaggcacatcttacatggcaacaggcaagagagagcctgtgaaggaggaactgtcaaacacttataaaaccatcagatcttgtcagaactcactcactatcgtgagaacaacataggggaaaccatccccatggttcaatcacctcccaccaggtccctcccttgacatgtggggattatggggattacaatatgagatgagatttgggtggggacacagagccaaaccatagcaataggatatggagttatatagtagacttaattttttaaagtaagtttttaaaattctgaataatgcagtgtaactttttgtaactctagcataaagatacctctgtatgtatttatgcaacaaattagataatctcataattcactgagcgtaaaagatgaacaatatgccacattctagatcgtctatatagccacggctatatagacaaaagcagatagaaggtttagaaaaacgtttggatcaaaatgccaaagacttaactaagtaccatattatatgagaatcaaaggaagagatagttttgtgatctgaattatttggattgattgcacaaagtgacaaccagaaaaaaagaacagaaaaacaataaaattattcttagatgaaaattttattagcttctctttcctctactctagtgtaatattttcttcattttacacacactttaaaattcatctaagaagaaaatataagatttacatataattcagatactttttcttatgagctagagaggccaaagaaacaaaccaacaaaccaaaaaacaatcccttccattaaacccctgagtaaaagtcaggaagttgatcatatgcgatgatgtgacacctcttaatcacggagaaaggacattgatgaataatcagcaggatagcaaaggtgtagtgcagtcactgataggacatcagcagttactcctgggaaagtgtaagaaattttaaggaacagcagaaaagaatgaaggactcagctccctaacagaatcagagaattcataggctcagataaaggtgactcgtttctgtatttctatgtcagaaatatacaggagctcatccccccaaaagtgaagcagtctatagtcacaaattttattttggaaaaatgaaacaaaaccagagaaaaacttagagcatctttacacaagcttttttttttcaagtgctttttgttattctaatggatcctatattcaaaacattccaagataatcagtgtctctctgcaggaaaccctgctgattttagggaaatgattaataatcggtcactttctctgcccctttcagcttctcttaagtttagtgaggaagcttaaagaattcttacacctccccctgctggcagcaaacaagaagtgcaggtttggtacgtaaaacacgttcacactgaaaataatggctaagatcaacttttgattctaaaaacaagattctttccatctgtaatccgtgaaaaagtttgaaacatgaatttaaaacatgaaaagtaataataaagttttgggaagtactgcttttcagaagtcaaacaatgagtattatgttaaaatatttaattcaacagcattccttcaaaaatttatatttctgaaatctgactccagaaatgactttgttgtgacctttacgtcttttcaactgtgtctctacttgctgccattctctctatagatcccattattatccgtcgcggagacaggaggttcgtcaatcacttaatctgctcccctgcactttccaactcccttgctgttcttgcttctgggcggtactgatgggtcacttacgggtccacacacggaggacccagcccatgatccccatctgcctctgctgcggcaggtactgcagatgttccagagagtggagtgtccatcaacctagatgcttgagagcctatgttgagcaggggcctctgtgtgttcctcccctcattgacctacagctgaatttgagtgagaactacctgttaggtgttaagcaattgagagttcatttgtcctgaaaataacaacgtagctgatgactttagaatgtaaaccaaaacatatctgatacaagtctaaatcaatttacaaagtttattttgccaaggttaaggaggcacacccctgacacagtttcagaaggtcctcacaacatgtgcccaaggggttcagggcacggcttgctttcatacattttagggagacgtgagacatcaatctatatgtctaagatgtacgttggtttggtctggaaagacagggcaactcgaagtggggcaggggcttccaggtcataggtaaataacagacaaatggttacattcttgtaagtttctgattagcctgtcactgaatatacgatttacaggaatagtcacttatgccttagtctggcttagtgaaacaatagggcaaaggaagcaatcagatatgcatttgtctcacgtgagcagaaagatgactgagttctgtctgtcctttatccacaaggagtttctttgcagacaaagtgggagagaggtatttatctttttaatctttgtagctgttttatttaggagtagaatgggaggcagatttgtctgcagtacttagcttgacttttccctttgttagtgatatgggggttgcaagatttattttcctttcacaggtatatttgcacctttcacaagaacattaagaacaatcctgagcattcttcatgtctcgtttgatccttaccactgccctctgcagtactttatatagatgttattagccacattttgtatgtgacaaaactctggcaaaggtagattagatgcattgttccaggtcacacgggcaagaagtgatggaaccaggaatcaactcagattccaaatttcctcaatttttatttcgactttacattgtctcataaaacaaaattcacaattatgtaagattaattacatcaagttgaacatcatcactttgtttaaaaagttataggggcaaatacatttaacacacaaaaaattattaagtctactttgttgaaagcactactgtaagcattgcaagatatacaaacaagtatgagatgtagtccttatcttcacagaaattacactcatgcttggaagcccagtcaaagaaacatggaaagctcaagagcaatatagaaaactttacaaatagtccctgactagttgtcaagttagcttttcacacattaggtgatcagtaaatgtttgctggggagaaggcagaggacagatcacgaaagaagggtggagaagaatggtgaagaaggtgagtgatgggattatagtgcagcttcccatcctataagagagtcaggcaaggctccatggagcaggtgtggtttagcataaacttaatggatgggtagggttgtattcaattgtattgaatgatgggcaggttttatcattgccaccaaattatgaagggccctgtgatggttaattttatgtgtcaacttggttgggccatgaaatgcccagattatatgtgactttgggggtgtatctgtgagggtgcttgtgagattaacatttgaataagtggcctcggtaggttgccacccccaatgtgggtgggaatcatcaaccccttaagagcccgaatataagaaaaggtggagaaaggaagaattcatcccttttgttctgcctcactacttgagtaggacatcccatctcctcttctacccttgaaccggtatttacaccattcattctcagactaaaactgaattacaccattggctttcctgggtccccagcttgcagaatgcagattgtggcaattcttagcctccatatgacatgagccaatgcctcataataaatctcctttttatatacagatagatagatgatagatagagggtagataaatatagggacataaatatacacatagatataggtatatatctctgatttgtttggtttctctggagaatcctgactaatgtagttcctattaaagaatttgcatttatcttataggcagaaagacatccttaatgtttgtagaatattgcactgtcagtaaaatatcttagatagtgcataaaggaggtataggcagagaccagcaagagagatcattaatatacacacagttatacatacttacattatgttatctataaccatgtctctttatgatgtctacagatatgacttttcaaattttgtctgaatcaactattcacctgtacaaaaaatgacatctgttaacagttttattctagtcagttaatttccatattctttaaaacaaatgaagtacagtagatgaagtatattgaacattatttttattggaggaatacatacttatgggtttgtcttagtctattcaggctgctttaacagaacactataaattgggtggcttataagcaacaggaatttatttttcacagttgtgaaggctggcagtccaagatcaaggcaccagcaaattcattgtcccatgattttgaggaggtcccactcctcatagatggtgccttcttgctgtgtcctcacttggcagaagagaaaaatggcccccttgaagcagcattgttgtctggggttaatatccgggattcatcatctcgcaccaagaagatttaggacagggacacacatgaagagtgggcttaggagcggtggtgtaataggcaaaagaaagacaaaggagagtagctctctcatgagagagaaagaaacggggggaaggggggagagagagagagagagagagatctgaaagggaaaaactggcatgcagcagactgctccaggttattattattattattattattattattattttgagacagtttcattcttgttgcccaggctcgagtgcagtggtgcgatctcggctcaccacaacctccacctcaagtgattctcctgcctcagcctcccaagtagctgggattacacgcgcacaccaccatgctcagctaatttttttgtatttttatagagacggggggttcaccatattgaccaggctggtctcgaactcctggcctcaagtgatctgcctgcctcggcctcccaaagtgctgggattgcaggcatgagtcaccacactggcctgtgccagattttataggcaggcttgaggaggcggtgtctgatttatgtgggatgcacagattggttctatcaggtgtgacatttacctggtgcagcaggaaaggctgtatggccccaccctaatcttatgcaaataggctttctacttggccatcttgtctgctccttactgtacatgtggttggcaaagtgaagagaagatggagccgccattttgaacatgcctattcctgggtagccttttcctattggcgcaactgtcagcattcacctgtgcaagcttctagcttgcttgtttatgtctgcagctcaattttacaggctactctgcattagaaaagcaaattatttgggggctgcttttcattaaaagggaaacctttccaaggacttccttaccctcactatctgcctaaataatttatttttaactcctatatcaccctcaagctcctttataagagcactaatcccattcatgagggtggagccctcataacctaaccaactcctaaaggtttcacctcttaataacatcactatgggggttaggtttccacataggagttttggcaagatgcaaactctctgaccttaccaaggttatatcaaacacagcaaaagaacatctaatggccacctctggttctattcctcaaaggtaagctcctttaactgtctcttttagtttggggtgataattaccttcacaactctgaacgatatacttgtacctctatttcttgactaaaaaaatactaaaatacatcttgtcttcataattcggtacatgaggatttatctcatactattctaccttctctcaattagatattttaatatcattactttaaaggttttaaaactactttttaaactatcgatagcattcttcttaacctcctcccgtttttttttccatcaacttctgccaatacttcttgactctctctttgtgagatgaagaaatgagtgcttctgccctttcctccataggttctcttcctcctgaaagtccaacgtgtttactttgatcttgtgaagattactaacatttacctctccagcaaccccaatcaagtcttcatgttttgacaatagattgatgataaaatttgaaaatcagtaactaatatttacgctggtctgatcatattcatattattcaatgctgagccaagtcatttgttcaaattagttttctttccataggcccattgccttcacctcttggtcaccctaaaaaatatttttcgagttaaagtcaatttgattcttcttttaaatacaacatcaattattaagttcatgttatatttaatttgctttttatctagataatgaatttcatgaccagggctatttgtttattttctttgaagttttaaattgtctttctttctaacttctattggtcacattcattatatcctgttttttcccttgttcttatctcgtgtgcctaatatgtcctggattgctctaaaaattttaccatcctactgaatatattttctccagggtctatgtttcttctggttgttattttctttcctgctactggtttttctcatttgcctggtgatgcttggttatctattcagggatctcatggaagaaaagggtacctggtgtgaatttcccctgctattggattttcaacggaagttttacctttcctgggaattatacttggctcagttggcttttctgtgtgtggccaagtcaggccaagtgggtggctgtaattgctgctcaactctgcaaatcaatagagctccatcttttaaggctgtaggtagaggggatagtggccacaatttcttccctccccctacttacctgaacaagcctactttgatagccctagggctaagaagttgcaatttagggtaagtggatacagaattggttgtctatgtctccaaccctccaaattccaggatgatgagggcatttagtggttgcagaagcaacaagaggctatgcctggagggaatgccaacttcatggcctctgtggagctaaagaagtgggatgggcacatagactgcataatggcccatcaaagatcttttattgattcctctgtttcaacttcacttctctttcctacaattggccatctgctaattctgaacccagaatttcttcagagttctacaagagagatattcctcacttcctggtagaatattccaggctgattttattcattgtttcatttaaatatttacatctatccgctctggctctgatacattttttggaatatttgtacattgataacttttctcagcatttatattgttctttcagacatttggagtatattctttttgtacctgatacctccttcatctcactccggttaccattagtgattcaaaaaagatgagaggcaaacatggatgttactcatattgtcttctctttctcagagacatcacctagttcagaagccctagtggaagaatctctatgttccaagaggaatatcaatatgaaggataagaaataaaggctgctacttgaggagtcaagtggtacaaaggaaatgaacacttagtggcaatggactactgattatatttctcaacctcatggaaaaaaaaaagtgggctacactgatttttgattaggaaattgtattagtccattctcacactgctacaaagaaataactaagactgggtaatttataaagaaaagaggtttaatttccttctggttctgcaggctgtatagaaagcatagcggcttctgcttggtttctggggaggcctcaggaaacttacaattatggcagaaggagaaggagaaggagaaggagaagcaggaacatcttacatggccggagcaggagcaagagggagaggtggggaggtgctactcacttttaaaacaaccagttcttgtgataactcactcactcgacagtaccaacagaggatggtgataaaactttcatgagaactcatgatccaatgccacccatgatccaaacacctcccaccaggcccctcctccaacattggggattataattcaatgtgagattcgggcagggacacagatccaaaccatatcagaaacatactcgtatttttagattcattattcccctcttttcaactccatctatttcagcatttgctctgtttcaggcttgcttctgcacattagatttctggacttggtgtcttaaagaagaatgttttcttttctgtgtctctatgtgatacctccacaaaaaaattaaccagaatttttgttttgtcaccatcatcatcattgctattattacttaaaggattagatttccctgtttcctatttctaacctcttaaaatccctttggatttttaatctgcaattcccagtgtttgccagtttagtgccatctgcaaattagttaatgtgcagtttagcctttctttgaaatcagtaattaagatgtaaagtaagactgagcccaagactaattccctgggcttcccactgggacctctcctgagctccccaactcttttatgaccacctctggtttatcatcttccagccaaatctcaagctattttactaactatataattaagttgatttatgacagtcactagattaattttattttgtaaaatgttgtctgatacatatatttattttacttagtttcatatttgcatatgttgaaacattatagccaaagaagaaaaatatttttagtcaggataaccctgacattttctattaaatgatcacttggtctggagacatacagagatagtctcttaatattagttctatcatttgactgcagccgaagttcatcatctataatataattacaatccgatgatccttttttttctttcttatttataggtcttaaataatttttcagtcttctagtatctttccaattctttagggtaaaaacaaaaaatttatctccattttagtaaatctattcacttattccctgatcagccatagaagaatcttttgttttcaggtcttaggcattttctgttagctgccaattatctatgtctcagactgacattcaaataattaactattcaggtgcactgatctcaccaccaagggttttatgagcatttgagaaatttgtttaagtttaattgggaaattaagccatggggcaatgttattgcaaagctatactgctgtgttctgagtaactagactaatctaggtcagaaaagcacaataggacatacaaacaccccaagaacacaaaattgtgcttttaatgactgccaaattctaagatactttaatcttaccattctgagactctttctttttttggtgtgcagatcgggctctggtttataaccaaaatcttcttaatgatttttagccctgcctcttccctccagctctcctttctcctttcagaacttactcaagtattttattacttgtgtgtttgcaaaacatattgctcttttctctgtagtatcagataacattcctagcactctgagttagacactggtttctccttttctgggaaatgcatccagacaggcagtaaacatttttatttcactataaatacgtgagagtttatgatgtataacgggactatagagtgactgagtatttcttctcagctgatacttagctctcagagaagcctgaatgaatgggattttcttattttatattttccttaagaacttttaaaatttttctttaatataactgaaaattatcaaaaggaaaggcaaaataggaaaggagaaaggaagggagggaagaagagagaaaaagcatgagagcatgtgaacttgttcctaatctggaattccaactttcccagcatttttctgttatcttcacagtaactagacttaaaaaaaaaaaaacccaaaaaccaaaaacaaaaataaaacctggattctccctgtgtgcctgtgtgaaaatttttgaagctatacagtcacttttctccttttttgtcttcttaataagtaaaggtattaactgaagacatgtaagttgctttaagaaataattttacgtgtttgagactactgacccttataagatgaatacaaaaatattaggttcatttcttaagtagaagtcttttaattaggagcttgaataaaattagagaatgttgtcaatgtggttccaagtttggctatttgttgtactttgggcggtttcctgtgtccatcagatttaatgagcttctgtgatcctgattttggcttgttattattgtattcttgtgtttattctgacttgtcttgacagtatattattttcttctttctgctattttatatttgtggtgacttacagtaaagtgctcctagaccagaaatgtaatatgtaagcataattaggatgcctttttgtttcttcgcacgtgtgatatgaacatagcataccccatctatatgaaatacatagtcttacatattatttgaatcttattaattcatatttattctgtgtatattttcttcttggttaaaaaagattttataattgcttatgttctcagataatatgatagactactttaacaacaaaggataatagtgttcttaatagctaggtataatacttacttatgaggactaaaatagccaactggagtagacctctactgtagtgaatgtgtgtttgcaaaacatattgcttttctctgcagtatctgacaaccttccttttctctgtagtatcagataaccttgccaatggcaatgacaaaaaacataattatttgtgcaccaacctaatataatttattttttaaaataattgtcactatttcccacctctagctgtatcaatggtgaaaaacagagctatggctgtaaaaactttgtgcccataacatggaaataaactataatactacatgcgtcttagttggagacgtcattcaaataacatactttggaaacgatatagaaacttagaaatcagctactatattctctcaatcaagaataagaaaactgaagttcagagaagtaaatatctcagccaaggcagtacagtgtgcttgtagcagctccaggactaatgctgagcagttcctttttccctccttaagattatggcttcatacaatatagcaaaactgaaaaacacacagatttgttctttaaaaggaaacacctgtgggtcaaggccagcccctatgtaaacctcaggaaatacacacaataaaaaaatacatttgtatgctgcttgtgaattataaaattaatggctagattgacaattattgaaagtctttgtctttatctgagggagaaattatcagaatataaaccatgaaactaaatggtctgagttaactggattgacattaaaatcagctataaaagaatccactatttaaatatgccaacaacttaaaacactgtttccaaaagtgttcattctatgcattatatatatatatagatttttctaaaacttgtgaaaatctaaggattatgtcttaattaatatcttgttcttccattaaattgattatttaattaagtatggaggggtcaagcatcatgggcaccattagatggcagcattacacaaaactgttgtttgcattttgtacaaaatcatgttttaagttgccaaaaaagttagtttacaatctaatgtatatactctacagatttctttaatagtaagtttttaaatttataaaaaggcaagttggagattctggtacaagagaatgagacaaaacttagagagaaggaaaatagaaaagatgagaaagagacataagaacatgtaaaccaatgacaggtaaaagattatctcaggaagacaaataggacttctgtctatcatgctgactccattactatctgatggcatacaggatattgcaaaattctgtaactgttttgatcaaaattattttgttaaagaagtactaaaagtaaagtcttcactctgcgatgttctctcttaatgtcagaataaaaagtaaccacaggacaggtgcagaggccacgcctgtaatcccagcactttgggaggccgaggcgggtggattatctgaggtcaggagtttgagaccagcctgaccaacatggtgaaaccctgtctctactaaaaatacaaaattagccaggcgtggtggcacatgactataatcccagctactcgggaggctgaggcaagagaatcgcttgaagcctggaggccgaggttgcggtgagccaagatcacgccattgcactccagcctgggcaacaagaacaaaattccatctcagaaaaaaaaaaaaaaagtagctacattctatcaatcaataaatgagtagagattgacaattttgagttcctaggagttgggtatttacttaagtataattttatatgatagtgatttagaatgaaaaaatacttttttgaagaaaagacttcagtttaataaatctcttttagtaataacccaattcctttttggagacaggtgttatcttacacatttgaatatagtatatggaatgtaatttgctctaaagatttgacttgcctagtagacatcctatgtgataggtgttaacaggaagaaaaatgcgagagtaactccaaacattttacatccaaaaattatgcataaggtacaataaagtgtaatagacctatgcctaggtagtattctttgctgatatagaaatactgtatttctaggtaggaatgtagaaggtagcaagactgaaaggctctgctccttttatcttttcattggtcaatagtggatttaagttttgaagggcaaaatgtgattactccattttaacaattttcactcctccactccttcctttgtatgaccagcctctgacataatgagagaaaaaaagcctattgggaccagcttaattctatgacatattttaactaggcaagatcctcattaatgccagggacttttcggagtcccagtcatatccccttacggagatagtttatccatagtgtgtagatctgcaatagtataggatttactgccaagttctttctccaattcattccctacagtagaggtctactctgattggtcgagtagtttaatccctatccatataccttgttatattaggagtatttgctattgtctgtgtatgtggagatttttgaagctaaaatttttccccacccttccagaagaagcacagtgaagagctgcccctgtattcagggtgcctgattctttcatgctccggggcatattgttatcaccagctgcagtcaggggaaagaaaaaatctccgtccctcttatgtaatatagtacaattaggcacataatgtagattttatgcttttctctgaaacatctggcatgtactgcttaccaaaaccaaagcttggagagccagacctcctgtagcattttaatatcaatgtgtcttttgacatagtagttatctaatgtttgtgccagtttttgaaaacatcacatcttaaatatcacctcttgaatgagtgtaaattcaaaatgcctgccagggggttatgtgtttgtgggaggaactaatatctaccctaatctaaataccaaatgaattttagattgtcattctaacccaacattagcattggcccttgggaaaatcattgtttatgtattcttttcagatactcagaattaagagtcaatctatttaaaccttgttgctaatattacatctatatttctgacatactaggaaaatgtgtacagggtttttacatttgtctacagacaaaaagttaccaataaaaaattttaacaaattatcttcaaattctctagaaaaaaagatcaagtcacttggtggaaaagataaaatatcctgagatccttgtgaacaaaaacgtctctcactgagatccatgatcttcttgtggcagggcaataggggttaaagtaccatttccagcaaaacgtactgctctagcttgtcaagccaccttcaaaacattctgtgttcccataaaatccacattggaataaataaaacttaaaaaagaaacacaagtgacataaaagtaaaacaaagaataaaatgaggaagaaaaaatttatgtggttcatatattcagagattttagcaacataataaaatgttgataaaacatttacacctgtagctgcaaaatggtttgtattcatttacaaaccattattatttggcattagtcaggattccattaattatgttgaaattttaaaagtaaattatggaactgttagaactacagacaatgtgagtggactctaacatattacaacattaaaatgaaaagtgtcataagttacatagacaattttttttttttttttagaggcagggttctgttctgtcacccaggctggagtgcagtggcacaatcatggctcactgtggccttgaacacctggactcaagggatcctcccacctagcctcaggagtagctaggactacaggtgcaagccacgacgcccagctaaaatttgtatttttattttttgtagagacaaggtctcgccatgttgcccaggctggtcttgaacttctgggctccagtcatcctcctacctcgacctcccaaagtgctgggagtataggcatgcatcaccctacccagctaataactgttcattccagatagtcaccttaaggtttattaataagtttaacaaggagattatctggatacttattttactttggagtgttgagttgactctgaacagtacacagtgccttggtgccattttgctagaggttttgcagagaccttaggatgttgttcttgaactcttagggcctagttttctcaattaaaagagttggttactgcaaatggtttctaaggtagttttcagatctaaaatattgagttcatggatttcaatataatactctacagctctctacaactgcgtggtgagtgccttgttgtaagaatgttaagtgagttatttctacatttcggtatttttatattataatgattcttaataagtataaattatcagtggccacaacacttactataaaacatgttcaaaacagatggtagtgctggatgtctctaagtaaaagaacagatggagcaggagtttaaccctggaagctttgaagggtttgaatgacagaacttattttttactctaatttagggagaatttggtgtgaggatgtggtatactatttcagctatatgaaacagtatacatagacaggaaaatacttgagttccagcaatatggcagactgacgcaatgtgagccactttccactaaaacttgtgaaatgctatataaaatataacaatattgctttagtaaaaatctaaagatgagttagaaggagaatgtctagttgcagagtcaaggaggttaaccataggcagaatgtaagtgtatgaattagggctctggttcttgggatattgataatcaaatatacatccaacagggaagccatgccatgaggcccaagacataaagttaggcctggaagggttgccccttttttcttttcttttcttttcttttcttttctttttcttttcttttcttttcttttttcttttcttttcttttcttttctttcctttctttcctttccttttccttccttccttccttccttccttccttccttccttccttccttccttccttccttcctcccgccctccctccctcccttcctcccgccctccctccctcccttcctcccgccctccctccctccctcccttcctttctttctttctttctttttttttttgtttttttttgagatggagtttcgctctttgttgcccaggctggagtgcaatggcgcgatctcggctcaccgcaatctccgcctcccagggttgccccgttcttaaagaacagttctgggaaaagttaagaaagcttttctataggcaaataaataaacctctcaggagaaatcaaaacctctactctgaagtccaaatttttacatccatgttgtatatgattcctgagcagagaaactaatggaatatctgaaaccagcaaagtctctggggcattctgcaaaagcaaatatagagagtcttccataagaagagggtacaaaacaccccctcaggggagacaatcatataatacaacaacaataataaaataccaacttaagatgagctcacaataaaaattataaactacgtaagggaaagtcagcagaaacaaaaataactgcctcgtactaaggcaatcaaatggttagtataaaatatgtaagtgtcaacaatatttaagtcaagggagcgaaaatgatattgattttttttgattatcattttttaatttatacttttctctagtctcttgaatgtttcaccaataactggcatttattttataacaagaaaaatgttacaaaggtttctgttttgcagcattcaacatactgattcttggggaaagtttcaggttgctctcaggtcagtggtaacacaaatatataaagttcctattgaattccatgtttgtttgaaatgctgtgagaaatcctaatatactggttcataacaaaattttatttttatcttcaaataaacgtttcactgctttttttttaaaaaaaaatcagtgttctggaaaagcatcagcaatcatggaaataattacttcctcactcaatactgcatcccaaagacttctacacttagtctctgatggcaatatgaaacatgcagcagtctcaattatcagatggtatctttattagtgcattatcttaatctgatgattaggatatatggtgatccattagtatcagagtttgcagacataaggtaagtaaattgcattcaaaagcgaagggttttgagctataagtaatcgcatctctcccctgtatgtcttcaggagtacaaataacctttctttttcttaaaaaaaaaaaaaaaaaaaaaaaaaaaaaccagcttggggcccagagtaggggcacacacagctttcagagaaaggagggggcagggctaaccaaaggctgccttcaaaggtggttgagacccagggggattttcatcacaggtttttggcattggaaggtctttgaagatttttggatttttgcttaacatgtggtctctgagcctgctgttctctctgctgatctgaagccacatagcccagcatgactcctatatgcttggttttctggaggtaagtccccaagaacctctcctgtttttcatccaatgattacttttcttatgggagggttgcaatttccctccccctcttccccacccactactaactggcatcccaggctttgagcatccttatctgtccctcgattgtatcagacagggaaagccggaaaggaaaagtagtagggtagaaagtagccactagatggcagaattgattaagcagaatagtatgttaaggctgtgcattccagctacaaacaggatgggaagagacggctctaagagctggtgcctccacatttaccccagtactgttcctcacccgcccacaggtggtctggctgatcctggcacactgtctttacattccacaaggaagtggtgctttagggagtgacctcagagtctgccaattagcatgtaaaactcttgtgacgttgcccctggaggttagagatgcctctgaaggttctctagttcaggaagtggtgacctcccgagcagcatatgtccacccacccagaaagccaaacacctactctttaatgtcccaagcagaatactggcatcatctctttatcttaaaattttaagttctgtatatattatctacaaattctatattctattttggcacaccagcctaacccaagcaacagaaagtggacagattatccattcagtttgcagctcgagtttacaatggcaaattattcattgcattatcagcgaccattagctttacagagtaccacaagattgagacaaatatgaaaaaatatgaagaactcagcattcaaatataccttaagttttgttcagctgtaatttgaactcatctaacatctgcccactgtattggcttgcttcatgcagcaatcctatttatcagcagttttgtgctagttaaaagaaacacagagtatagttcagggcctgaagtttagaccaatgtctgtctgtgtactgtctacttttaaaagaatactctgaggcattgtactccgtcaggctagagtataatggcatgatcacagctcgctgcagcctcaacctcacaggctcaagctatcctcccagctcagcctctggagtaactgggactacagacacccatcaccatgaccagccaattttttctattttattttattttattttattttatttattattattattttttttttagagatgggggtctcactttgtttcccaggcacatctgggactccttgtgtccagcaatcctcccaccttgacctccgaatgtgttgagatcacaggtgtgagccaccgcacctggccaagtactgtctgcttttacaggcagcctttgtgtgaacagccctgggattccaagtgatgttgaaaccctaataaaaagtgacagaatgcttactttgtcaagaatgtgcctacattatctcacttttttgtttgtcaaactttggacccagatcctattagcagcttcattttttttggtaaggaaatggaagcatagggcagttaagaagtctgcaaaaatcccccagctagcaatgataaagcagatctggacaacagaataattcaggacaatttcaatctttctctggaagttgttttttgttgttgttgttgaatttgaatgttctaaacattacatctctatttaatggttgcatatagggtcaattttatattttccctaatttgtaaatagtcacagaacctatcatgttctgaataatggctcgtataaaatatggactcttcattaatttaattaattgtgacctagagcatagagcttatcttttccagacaaaatgatggggttagagtgttataggaaaatgaaactcttgtgagtggttatgtgaatcagcctaatgatagccaattgtcttttacttcttcagttatgtaaattattggtattataatttctgtatgtgctgatgggatatgttactgagtgataactgcatcatagctcttacctgtctcctataaccacaacccagtagctgaagaggaatcaagaaccactgttcttgctctctttttttaccattttaatttggaataattttagattaagagaaaagttgcaaagatagtacgagagttctcattaacactccattcagcttcttctcatgtcaacatggtacatttgtcaaaactaagaaattaactttggtaaaatactattaactaaattgcagcatttattcagatttcactagtgttctctctctgttccaggacacaatggtgcatgccctgcccttcccttttttatctaattagtgctgaaatgtgagagtatatcagcccctcgatcttttgctgcctgtgtgctttaaagcccagagatctaatgcaaatctcatgagtgctgggcctagtgggaaccctgcttgtgctgctaggccagggacctttggacgagtgttagtgccttaggctcatttccaacttttctgaggtacctcactgagctactacaaaaagataccttttcatcccttctgttaaaaaataaaacaaaacaaaaatactccaagcagtactttgctattgaggacaagatacaaatggattttaaaggcatcttttatgacactattccttttcattatttcttggtttatccactaagcgagtcactgcttctttgggaagactcataccatcaagtgtttttgatacataaaatccagattgcctgctttggccatcttattttgtttcctcactagtttttcagcatcataagtcattgagtatcaacacaacaaaaactgttgcaattctctattggtcatacaaaataattgttagcgcttctggaaaaagaattttaatataagtgtataaaagggatcttaacacaaaatcacttttaatttcctacgtaacaagagagatctttacaggctgacaatgacttataaacaacactcaagacagtcacttgggtgatatgaagaagttacatttattattattataattttggtctaaataatgaggcttcctatacatgattgaaaaataactttctggtttctcagctgtcagctgtgtgctcaggttatgcccgtgacagtcacacagataggaagcttatattaaaaccagaatcaaaggtagcaggagtaggaatcagcctacgttaacgaaccattgaagcctctctctggcatgcatgaacactaaatcactggttagatctctggtgatttctcacttgagagatgtgaagaaaatggcacattcagggtaacagcaaagccgtagcaacttgtcaaaatagtatctaacatacaggcttaaaattattcttaaaatgatcttgatagagctactggaaatattcccaccaggtattttattcagcagtgacccttgaagaagcaagtcagtgaatgtggaagcatcgggattcatctgatagactttgtctgggatcgtcaaccactttggtcatagttaacatagtttacataatgaagggttcttttacggctcaagatagagatgagaactaagtgacacaaaattatgagtcttttcttaaattgactaggtaattacattgactattctctcttttacttttgaatagctgcactgcagtcaaaccatctatgacattattattcaataaattagacagtactgagtgttaggctaatttctggcacaaattaaaatactggtaacagatcctgatgctgattattccctcttataattagagtttacatgatagaaataaaaatttgatttttttgtcctttgtaagggagttataccttcttttgttttattttagagacagggtctcactttgtcacccaggctggagtgcagtggtaggatctcagctcactgtagccttgacttcctaggttcaagagatgctcccacctcagccatccaagtagctgaaactacaggcatgcaccaccacacctggctactttttgtattttttttttttttttggtggagacagggtttcactatgttgccaaggttaatctcaaactcctgggctgaagtgattcacctgcctcagcctcccaaagtgttgagattacaagcataagccactgtacccagcctataccttaattgagagtaccttactttcagttaaggtataggctgggtacggtggcttacgcttataatcttctttcattttgaagatgcataaattgagcgtctcttctctatttgtttagctagatgcattgttgtttgcaatttaatttgcatgtgttcatggggacattctatgtgttaggtagtatgggagtttgagattaatgaaactcacagtccttagaggtttttttttttttttttttttgagactgaatcttgctttgttgcccagactggagtgcagtggcacaatctccactcactgccacctccgcctcccgggttcaagcaattctcctgcctctccttctcccaagtagccaagtagctaggattacaggtgtgtgccaccacacccagctaatttttgtatttttagtagatactgggtttcaccatgttggccagactggtctcgaactcctgacctcatgatccacctgccttggcctcccaaagtgctggggttacaggtgtgggagttgaaggaagaaggaagcggataagtgggaggaaaactaaagaaaacagagcagaataaaaaaatatatataatgtcagtttttattctgctaaaatataatctagattatgtagtttgtgtttccatattcaacagcagtgtttctgaatcatagaagtctcatgtttagaagagtaaaacattttattaagatttggattagatgataactaactttgctaccagctgtgtgattccagtgtcagatcttaacaaaggtagagagtttttcttacttttcatctgataattataaaattaaaataaatatcaaaatgtttccagatatgtcagaaagctgaagggtttcatgagcctagatggtttctgttatccgcaaaaatagatttttaattaatccatggcccaagatgttggtttagttgtgttctccttcattttagttcagaatctggagaggatacaaaattcaatagatttttctttttccccccccagcataggaactacagagtaaggatagctctgcaggtatatgtaaaagctaattctatgaggagccaaagacagggtttcagaaagtccagtttaagacacgagagagagatgaacgatgtgcctccagaagtatgcatagtccacagaacaaattatgtagatcagttgaactggtgaggagataaacacttttggctagttaagacttcatggaagacgtgggatctccataagacttggaagaacaagttgcttttagaaagtgtgggagaaggtccaggtgctgtggctcatgcctataatcccagcactttggcaggccgaggcaggaggatcacttgaaatcaggagttagagatcagcctggctaacatggtgaaaccccatctctactaaaaatacaaaaattagccgggcgtggtggtgcgtgcctgtagccccagctacttgagaggtggaggctgcagtgagctgagatcgcaccactgcactccagcctgggtaacagagcaagaccctctttcaaaaaaagaaaagaaaagtgaaaaagtgtgagagaagaagcaaagtacatataaaaggaaatatgatgagaataaaattccagttacacaactgtaagatgtttctgggaaataacagtagacctatttcatatggatacacagggagataaaattacaaaaatgaggacagatctttgatgctgtgctaaagaatttagacttggtcttgaaagcaacaggaagataccctcaggccctgagcatagggatgacatgattgaagtactattttagaaggtttacctaggaataaacatgaagaggttgatatagggagttattggaggcagaatgaccaactgaaaagttttttacagcagtccaactgtgtaactaaagggcctaaaatagagtagggaaagtggaaatatacggaaagaataaaatgtgaaagacaattcaaagctgaaattggcaggacaggacttcatgcctaattggattcagataaccaggtagggaagaggtgaaaatgtatgaatgttctgagtctctaagactgtgataataatgataaaattagtccaaactgagagcagggattgagtccctaagactatgataatagtgataaaattagtccaaactgagagaagggatacctgtattcctgggctgttgtgagaattaaataaaaaaacataaaagctgttttaaaatttctgaattatatgaagatatggcctgattagagaagagaaagtctaaataacaaccaatagggtaagaatgagataaattttgtatgaggaatcttgggtttatggttatccaagtagagatggtcaaagtgccattctcaatgatcaccattgccataaacagaggaatctattaggataaaaagagaccagcacagaatcagttgtaggtgttaccagaaacatgacccacatggccacctccatttggtagtgtttaagtaagtaaagaaggtagcaaggcatcacaccaggagaaataaaggatattttttgagtgtgtatgcaatgtgccaagtgcttttactcacacattttattttaacacactcattatgttgggtggtagaagcctcactttagagatgagaaacatggcaatcagattttaactatatctccattaataaacagtgaagctgtttttctgatttcaagacaagtgtcttttaactagaccatctatactttagtcttggcatggacacataccaggatgactcaacttgggtgacataacccctgtgaaccttggttcctactgtaagatgggaaggatcatatttaacttatgtagttgctgtaagggtaaaataatgtgaaagagttgtgaaaattgataagtacgggacaatataacattattattagtgtgtagtgataagtttaatttaaacacatgattgtacaactctgcttggaagaagttgctgtgaaactattaaagtatggctgacattctccaaccatctgacttaaaatttccaaaattaattttcactgggcaatgcctctgaaatatatcttttccttgatttatttatatagaacaacagaattatctgttctagttagataaaaatttctaagaatcatttaaaatttactctgaaattccttactctctaatcttaaaagtccttgaatatattagtttaacgtagctctttcattagtacaccacttccatactgaactgatgacaatgcttattttaaagcttttgtaatgcttaaaaacatgcctagatcttcaaaattatggtcaccattttgttctgtaatattgtgtttgtcttctatgaaaacctgccacattcaatagccatatgtatgttaatgaaagaataataatgacaactaatagaacacaagatgtgtcagtgtacgactatcagagcaaaatcaaaacaaaactgcataaagacattatgaatctggatctgaagcttcttggttcttaactagttttatgttaatgaaacaattattagaacacacaaaacccttcctttttaatttgataaattgagtggtgatgtgagttaattgaaccatcggtgtgataataagatgcaactggtatgatttatcagaggatgacatggttacaggcattgcttccacagaaaataatggctgttattaccacttcctgaggtgagcaggcaagccataaacctagcttattgctacacaggtcagaggatgaggggtccattttgccttttgtcttagtggatcctttaaggctgtctcttaataatttggaaaatatttttccatattccacaaacaatatcaatactgactttgtttaggctattctataatcttaacctatttagctaagtattaaagtgaaaaacccctagatctccaagagctttgagttctaatgttagtaattaaggggtcaccttgggtcttctttttcaagttgcattatcttgtagagatattttcgcaagtggttattctagtggaataatcctccagggctctgccgcttgagaagtaagtcctgtgctttttcatatatgattcagagagaatattacatgctactcatcttctggtggaagagaaagaaataagtgatcacaaagccctttggtttgcaaagaaaacatttgaatttacaatgttatatttctttgtatcccaatgacttcaaagtaaataaaaagtaaatcaatgtcactggatccatgaaatatatgtatctggacatgggatctatttctgccacatagtgatattaggaaaaacacttgccatatgttcatactatgaaaaattaatccaagatcttggaaagagcttgtgcctatgctgaaaaggttatatcttaaaatactaataaaatcttcattcttcattaatcttttattcatttattggatttctcatttttaacctccatttgtacatttttcaagcttttttatacacacagccacatatgttcatttaattcttaaaaccattctgaagttgacatgtcatcatataatttattatagaaaatgaggagctcttgaaaagaggaaggtcttgttaattaatccgagacaacaagtataagccaggacttctctgagatcagagaatacagtcactctaggtaagaaattcatcaaaattttaaaaattcaccaaagaaatacagtgggaaagtgacagagccagaatttggttccatgcttttaggacctaacattttctaacagtccttcccaacagattttgggatttcctgatttactaatttgaaatgattagagggagagaagtcagggatcccggcctgcaaaaatattaatgcaaagtagatactatgtcttatatatcttcaggtatttaacttgaaacccacctggtcttcagtgaacatttgtgcatctcaaccaaatcataccacttgacacttcaccattttggatatattcctttagatggtaaggagctttctgttttcaaaagtcaatgaatagaaaaacaatatacccccccacacacacatatattttatatatctatatatctatactcatacactcagatcagcccttccttcattgtctgttaatcttggtttgcaaaaatctgcacataaattttacgaaaaaatgatgactgtcagatattttctaggctcagaagagaacagaatcacactgttttgggagataggaaaagggcaacagctttggtctatttaaccattcttcaaatagttattatgccagttttaaccttgtccattttcacacctttactggctgcacagacaatgctaattggaaacattttgtttgtaggaccttctggtctaggtggaaattttaatttgtttaaccacacttaattatgaaatacatcatctacaaatttgtagctgctaagaggaatggcctaatgagaggatatggaccatattaaggaaaagaaatcagacattgtaatcgtgatacgctgaatagaaccctagatctaccattaaatacctatgtgactttagttgagtaacttcattctctgggcctcagattccctatctgtaaagtaggctaattaggttagctggtacagcatttaaaacatagttttactatgctattgttttgtaaaccagaaaacttggtgatgcaatataatttccaatgataagacatgaggaaatttccacagcttccatttttttcatccttttatctttagcacaagtcacctgaacactgaatgctttcccttttctaaaagaaagaaaaaagaaagtctcaaacattaattttccatattgctaccatattaataagagctataaataaagattaaatttaagaagaattacagcatggaaaaatctccacttccctacatatttaaatattaggaagtatttctggagattttgctacatcattaggttatcaagatgacacatttccgtttaatatttaattatattatctctcagttgttcactcactccctttcctgttccctaatgatttgcttttaaatctaacttgccacactttccagctgtggtacactggatgtgtttcttatcttttctgagcttgtttatgcatctgcaaaatgggaatgatgacatctccactttatcttagaagaaagtggtataattccattttaatgctggatgtaaataaagacttttgaccatcttttaaaaaattagatagccacaactcagtagcccattgtttatgagtcagatcttagctatgtatttccatgttacctcatcctggagtgctccaaagaatgttgctcttggatatttccaggaacaatagccatcataaaggacttgagaagtgaggtcctgaaatgttgaaagattttctacccatgttttacagaaggcatgctttatagattacaacaattatctcttattacccatggttttttttttttcacaacaggacaggggctgcagaaacacaggttaaaactccaatttccttatatcatatttagcttgagccatatttgttgtcctaaaaaatgtggtttatctataaatatcttcttatattttggttaaataaatacatgtaagagtaatttttgagaagcaatttagctttgtttctggcacaattagtagtcaacactgaagtacatctttttggattgtgacaatagagtttcccatgttgtggtagaattgtactcttattacacaaaataaagagtaaggagcaagaaattgtaaaattctaaaggggaaaagagattatcctctattcgttttctgtctcccacaaatacagtgggagagacttcagtgcttagagacttacagatttttggtatttcaaataagaaagctcagaggacataaaaccattttttgtttggtggcaaattttaatactgtgacattagtatttacacttaacatagataaacctttccaattcttaaaatctttgaaatcagagaacacttaagacacccaattctttagactgaagatgatttgattacctctcaagatagaagactggaaggcaatatgcttaacacaaagttgatcatctgtatttcttaccagcaagtcaaagaagtttaagtaaagatgaagaaatacagacattcataatttagtttcaatacaatgcagaaccattttgtcagtattcaatcaatattcatgaaaaaagtgggcgtggcacatgacaggagatacaaaaatggttgctacaattattatctggcatcctctaaaggcctattttaagaatgcaaccatgattgtcattaatagaacaaatagtgaaaaatcatactgttatctgctggaacacctatacttctccactgtctgcaaatactatcagcaagttctttgtatcaaataatttctattgaaatcaggctaacaatgtgatgttaagtaccagtgcggtaagactgatgtgatttgagcactatgtcggtcgaatggtgccaggaacagcctctaagcaaatacattaaatcatgaaatggacgaaagcatccttctgtcttcatgagcccacattcaggcagttgatattctggcttccacctagaaatttatattcatcaatcagtctgggcttactgggaatgtgagaggtacagctagttgtgttatgttgtattgataatattttgtgtgatttgttccatatctctagtggtctggggggagattatgtttccagccttttagtacacataagaggacatgaaataaattgttgactctattgcactgtcagcaagggctacagaccagcaatctgacttctaaaggttgaggttattcaccagtctgctctagagaaaccctatacctgcttacagatccctaaagctgatacagggttcaaagctccaaaagaatgtttctatattgcaatgtgatctataataatatatacgccagactataaactagaaaataagatttaggcagtagtgtaaactagaaagtgctggaaacagcaacaaaatttgtcaaacttgttaatttgaaatgcaagtcatattctccacattatttaacatttcttcttttaattacgagaaatatgagattaaaattcaattagaatgcatagtagacaaacagaccaatgaaaaatcacaagagaagttaaatatatagacccaaatacacaggggaatttaggttataataaaggtggcaattccaatcaataaagtaaagatgggccattctatataattaatgccattagagcaaatggtaaccattcagaaaaaaagacaaaattggatccttaactaaacaagatgttgtacatccagagaaataaataatttaaatgtgaaaggtgaaaccataaaagtactagaagactttttaataatagccattctgactggtattagatggtatctcattgtggttttgatttgcatttctctaatgatcagtgatgttgacctttttttcatatgattgttggccacatgtatgttttctcttgaaaaatggtctgtttatgtcttttgctcacattttcttggggacacaagtttacttatgtagcaaacctgcacctgtaccccttgtgatggttaatactgagtgtcaacttgattggattgaaggatacaaagtattgatcctgggtgtgtctgtgagggtgttgccaaaagagattatcatttgagtcagcgggcacaatctaatcagctgccagtgaacttaaagcaggcagaaaaacgtgaaaaaagagagactggcctagcctcctgacctacatctttctcccatgctggatacttcctgcccttgaacagctgactccaagttcttcagttttgggatatatatatatatatatctcctattagttctgtccctctagagaaccctgggtaatacatccatgagcttaaaataaaagtgaaaaaaagaagagctagaagaaaatatgggtttattctttcataattttggactggaaaaaacaagttttctaactatgacccaaaatctagaagcataaaagaaagaattggcaacttctagcatgtaaaactaaaacatatgtccccaagacaaaaacaagacaaaactaaaaattaaccatatggaaagttaaaagacaaatgtcaaattagtgaaacatctgcaacttataatagataaaaaggtcaatctttattatacgcaaagagctactgtaaattgatataaaataaaccaataatccaatcgaattgttcaatgcttatttttatgagctagacagttcatagaaaaaggaatgcaaatggcattacaatatgaaaagaaccattagtcataataaaagatatgcaaaatgaaactagatatctttcctcacctattatattggcagaaaatacttttttaaaaagttgttgatatgttttattgatgagaccatggagaaacaaacactgttagacttttatggaaagagtataggattgtgcaacccttatgaagtagaagtaagcaatagctatcaaaattacctccaggtaatttcttttttattaaaataaaatatccttccactaattgttttactgcactgttctcaatcgttctgttctctgtaatatcatacacaatctcatctagctatgaagtggtggcatctggctttaaacctgtgcagccagcatgcaccagtaatcactatgcccatatagcctccaggaattgatatctgcattggatgtcccaacttcatcttagtatcaagtttgcagacccagagtggacgaaactagacatgaaaacctctttgatgtattgctttcaaacatgaatttatttttttctggatatgttacatattaccttgttatctctcatttcaaaaaatgtttcaagtgtatgggtcatttgtatttagttagctatagatgtatctggatgtctagtataacatggaatcctttaaggtacagcatttatttaaattttcatggcactttattattagctttcttataaggacttctcaacatgtgttcataaagaaataaatgaaagcatggcctaatcttaagggtttttctaccttctacagttctcaagctcttctttcgcttcagaagaagaccaaatttacattcactaatggttaaaatgaaatgggcagctgactgagaactccctgtgtaatatttttgaaacgtgtctaagatacaatcatataaaataagactgctataaatttgtgtaaaatacctctaactcaacaatctatggaatgatctactcattacttcttgcataacaagtactcaaagcattagcatattttattagattatcttcaaaatattttcatcttaagccatgttaatatacatctctaaaattcttaaattttaaacataagacctcagtgtataagaatcctaaaagaaaatctagaaaatgccattctagacattggccttggaaaagacattatgactaagtactcaaaagcaactttaatgaaaacaaaaattgacaagtgggacctttaaagagctccttcatagcgaaagaaactatcaacagagtaaacaaaatacctaaagagtgggagaaaatattcccaaactatacatctgacaaaggtctaatatcgacaatttataacgaacttcaacaactgaacaagcaaaacacaacccatttaacaaatgggcaaaagacatgaccagacacttctgaaaagaagacatacaagttgtcaacaaacagatgaaaaactgttccacatcactactcaccagagagatgaaagtcaaaaccacaatgagatcccatctcacaccagtcagaatgactgttattaaaattcaaaaaacaacagatgttagactatggagaaagaggaatgcttacacactgttaatgggaatgcaaattagttcaagcactgtggaaagaagtttgaatatttctcaaaaaactcaaaatagaactaccattcaacccagcaattccattactggttatatacccaaaagaaaataaatcagtctacaaaaaagacacatgcactgatatgttcatcgcagtactattcacaatagcaaagatgtggagtcaacctaggtgcccatcaacagtggtttggataaagaaattgtggtacatatacaccatggaatactatgcagccataaaaaagaacaaaatcatgtcctttgcaacaacatgaatgcagttgagggccattatcctaagtgaattaatgcaggaacagaaaatcaaatactgcatgttctcacttataagtggatataaatatagggtacttatggacataaagatggcaacaatagacactgggaattactagagtggggagaagagaaggtaagtgttgaaaagctagcttttggttactatgctcagtacattagtgatgggatcatttgtacaccaaacctcagcatcatgtaatatacccaggtaacaaacctgtacatatacaccctgaatctaaaacaaaagctgaaaaagaatataaagtaaaactcttaaattctgtgtattaggccattcttttttttttttttaggtttactgtttactatgggcacagtttgtggcaccccaaaagaatccaatagtaacatcaaagatcgctgattacagatcacaataacagatataataaaaaagaaaaactttgaaataatgcaagaattatatgaaaattgtcatagagacatgaagtgagcacatgctataggaaatatggcactgatacatgtgttccacatagagtttccacaaactctttttttttcattttttttcattgtttttctttttaattattattatacttttaagttttagggtacaagtgcacaatgtgcaggttagttacatatgtatacatgtgccatgctggtgcgctgcacccaataactcgtcatctagcattaggtatatctcccaatgctatccctcccccctacccccaccccacaacagtccccagagtgtgatgttccccttcctgtgtccatgtgttctcattgttcaattcccacctatgagtgagaatatgcagtgtttggttttttgttcttgtgatagtttactgagaatgatgatttccaatttcatccatgtccctaaaaaggacatgaactcatcattttttatggctgcatagtattccatggtgtatatgtgccacattttcttaatccagtctatcattgttggacatttgggttggttccaagtctttgctattgtgaataatgccgcaataaacatacgtgtgcatgtgtctttatagcagcatgatttatagtcctttgggtatatacccagtaatgggatggctgggtcaaatggtatttctagttctagatccctgaggaatcgccacactgacttccacaatggttgaactagtttacagtcccaccaacagtgtaaaagtgttcctatttctccacatcctctccagcacctgttgtttcctgactttttaatgattgccattctaactggtgtgaaatggtatctcattgtggttttgatttgcatttctctgatgggcattaggccattcttgcattgctaaagaaatacttgagactggataatttataaagaaaagcggtttaattggctcacagttttgcaggctatacaggaagcatagctttggcatcagcttcctgggaggcacatcaggaagctcatagtcataatggaagctgaaacaggaacaggcacttaacatggcagaagcaggagcaagaaggcggtgggtggatggtggctcccatacaccaagccttgagggatttgcccccatgatcctaacacctcccatcaggcccagcctccagcattagggattacaatttgacattagatttgggcagggacaaatatccaaactatgtcactataaattttcagtttaaatatttttttccagattatcttatttttaacaggtactacacctcatgctcttacctgttttgtttctagtcttcctcacctctctaggaaatgttaattaaaggagatttttcattagttccaaagtgtttttatgcatgttttcctatgatatattatccctctttgttttcatataccacaggtagcatgctactggtttggtcttgcttttttagttaacagtgcctccttgtatctctcccattctgtatatggagatatccctacctcttctttacagctccatagtattccaatttgtaaatgctacatagtttcctggcttgtttccaattgtttgctattatgagcaaagacactttccaaatggcagtggggactaaggctggacaacagagaatagtaactctagacatgatccacgtgcagaaacagatttttacacatgagaacgatcatattgtctaaaaataattggctgaaaaagacaacaccccactggagaaggaggaaaatggctgacctgcctagattcaaaaaccattggcttatttctcctctgcctctagtaaaaccatacctcaatgtctgctctataaatccatgtaaacttaaaaacagataattttaaagaaagactgcaatgaacataaaaaatattaggatgattaaaaagaccagaagttttgactagtagaaacgattttatttataccattagaaaaataagtatctaatgtaggtggaggtgcaggcaacagaagatgatacagttaatggattttgaatgtgtcaccactatttataagaattttcaaaagatagcttacctggagtttgaagtttattaaattcaactcagggaatacttatgaaatacctactactcagtgtacaaacttatgtgctatggagaaaatatgaaaatgataaatgacatgacatggtcccttttgtcagtgcaatgtaatcaagacagagaaacagaattgaacaattaataaggcaatatgacatgagaaacagtgttacagagtatgaaggaaacaatcaggaagaagcaattatgccatacagagaatcaaaaagacttcacagagaatttggcaaatgagcttgtccatgagaaataattggcatcccagaggctaaaaaactggaaaaggatcttctaggttgaagaagaaaatgtgtcaatgaagaaaatgttgcatgtttgaggtctaggaataacctagaatggcagaaatgagggatatgagaaagaataagaaattagtatggacgtaagttgcaaccagatcatggacagccatgcctacatggggtttggaaacaatttcaggaccagaattcaaccttgttgttgaacttcattgaggagaagcataattagctttagctctctggaactagtgcaaaggtgaaatggttgggtaccatggtggccaggccagaaggccattaaagacccaaattttaaattaaaacagtggatatgtggctgagcattgtggctcatgcctgtaatcctagcactttgggaggctgagtatcacttgagaggatcccttgaggtcaggagttcaagaccagcctggccaacatgatgaaaccctgtttctactaaaaatacaaaattggctgggcgtggtggcacgtgcctgtgattccagttactctggagactgaggtgggagaatcccttgagcctgggaggtagaggttgcagtgagcagagatcgcgctgctgcattccaggctggacaacagagcgagactccgtctcaaaaaaatataaaaataaataaataaactgtggatatggaaaggataaattaaatattcaacaaaataataactcttccttcaaatttaatctcaatatacagctttcagtttttaagaaaaatctccagttttatgaattgaattttatgttctatgatggcaaaaatggttatttcacatttatatgcttggcatatggtagatgcttaatgaatatttatcataaagcttgattggctttattaatcgtgacatttcctttatttaaatttatttaaataatgggtacctttgagaaaatactaaattttatgggaggattgaggatttcagtaagtatagtgttttagccctagaccagatgtcagcaaacttcttctgaaaagggccagatgataaatatctgaggttgtgttggccgtacggtctctgtcacaaatactcatctctgtcattacagtgtaaaagcagctttaaattatttggctgtattccaataaaactttttttacaaacatatatagtgagccagatttggctcacgggccacagtttatcaatccttgccctagaccaaacagaggatagccatctcatctacaagtaaagggttgaaattttaatatatttagtttttgaaataacacaattcttcatgttatgttattctatgttgctgcaactcacatttattaaagtataatttaataaaatttatctttttagtttaaattcagttaagttttgacaaatacacatagttgtgtaaacactaccacagttagaatatagaacaattccatatttaccaaatttctcccatgcttcttagtagttagccctttctcccaactcccagttcctgccaaccattgatctgttttttgtacctttgttttgcctttccaagaatgccatataaatgaagtaataaattatgtagccttttgagcctggcttctttcatttagcataatggatttgagatttgtccaagatattttctgtatcagtagcttctacctctttattgcatggaatttttttcaaatttgtttattcattcatcaattaaagcctatttggattattaccattgtttgggggcaattaacaataaagccattataaacactatgtaaggctcttatttaaatataagtttgcatttctcttgagtaaataagagtgggatttctgggttgaatggtaagtgtgtgtttaactttattttttttattttttattttttattatactttaagttttagggtacatgtgcacaacgtgcaggtttgttacatatgtatacatgtgccacgttggtgtgctgcacccattaactcgtcatttaacattaggtatatctcctaatgctatccctccgctttccccccaccccacaacaggccctggtgtgtgatgttccccttcctgtgttcatgtgttctcattgttcaattcccacctatgagggagaacatgcagtgtttggtttttttgtccttgcgatagtttgctgagaatgatggtttccagcttcatccatgtccctacaaaggacatgaactcatccttttttatggctgcatagtattccatagtgtatatgtgccacattttcttaatccagtctatcattgttggacatttgcattggttccaagtctttgctattgtgaatagtgccgcaataaacatacgtgtgcaagtgcctttatagcagcatgttttataatcctttgggtatatacccagtaatgggatggctgggtcaaatggtatttctagttctagatccctgaggaatcgccacactgacttccacaatggttgaactagtttacagtcccaccaacagtgtaaaagtgttcctatttctccacatcctctccagcaccagttgtttcctgactttttaatgatcgccattctaactggtgtgagatggtatctcattgcggttttgatttgcatttatctgatggccagtgatgatgagcattttcttgtgtgtcttttggctgcataaatgtcttcttttgagaagtgtctgttcatatcctttgcccactttttgatggggttgtttttttcttgtaaatttgtttgagttcgttgtagattctggatattagccctttgtcagatgagtagattgcgaaaattttctcccattttgtaggttgcctgttcactctgatggtagtttcttttgctgtgcagaagctctttagtttaattagatcccatttgtcaattttggcttttgttgccattgcttttggtgtttcagacatgaagtccttgcccatgcctatgtcctgaatggtattgcctaggttttcttctagggtttttatggttttaggtctaacgtttaagtctttaatccatcttgaattaatttttgtataaggtgtaaggaagggatccagtttcagctttctatatatgtgtgtgtttaactttataagcaacagtacaattgaaattttgccagtagagtaatgagagtttcagttgcttcacatcctcccagcatttgctattgtcagtttcttttagctttacccttttcagtagcaggataatagtatttcattggggttttaatttgaatttctctaatgcgtaatgatgttgaatgtattttcatatgcttatttgctgttcatttatcttttctggtgaagtgttcagaccttctgcctctttataaagtgcttttttaaactgttgacttttcagagttgtttgtatattttagatgcaaggcctttatcggttatgtgttatgcaattatttcctccaagtctgtggcttgtcttttcattttcttaacaatatttcaaactattatatttttgaatgttaacagcactagtattacaattagtttttaatgttctatgtttttaaaagaagaatcaactaatgagaatagtaaaaccttttctttgatggacaattttaaaatgatactcatgaatattataatacgaaataggatttttttatcatgccacagctttatcttcaatctgaaccttagtcatgacaataaatgctagactcacagatattctctgtcatatatttaattttgaagaactttaaatcttggagaagtgacaaaggaaactgacacatctatgaaataggacatcagtctgcctgcctgggctttctaagcacagtaaaagggaacattttcaaatagtaagctgtctcttttatttattgatcttcagctagaaataaagctatagtaaaatgctctctccatatctttctcactgtatgaaaacagggttacagatcaattgatttaccatcacaattgattaggtaccttccctactatctctattgtgacacgagacatgcagtcatatagatctttcattaggaaagtcattgaaaagctaaggttcattgcatgcttaaatggtttgtagcccactcattaagccattaactatccattaatattgcttaacctcaaacattaaagataaaataagttactgccattttatcttccaagtgcacctttgcaaagtgaacaagtacatgattttgttagaattggacttagatattcagacttgccaaggaattcaggtactgaagcaattaacactaataaaatttatatgtgtattccgttagttgcataccgcaaagcataaaaagtggaaacataacacagatatattgcttaaaattactttttctgcccctcacttaacctatttttaatatttttctgcattattatcaataacatttatttcaataagaaattttcttcatgatattgttaatcaacagcagtaaaaacaaagaaataaaagctcctcaaaaagaaactaaccattttgagatgatttgatatctttgtagtcaagatttaagttcaagtggacaaatcatcatccctagtatctaacaattctgtttcttttgaaataaaaccagataaattagataaattagaatggtcttagttactctcaataatatagataatcttttgtatacttcatatagagtataacataagtagagatagccacccaaatcatttgactgctacattgttaatatcctatcaagtcaactataaggaatatacaggtttttgcatataactttttataatatactttttcaggtagatttattcacagaaaaaccaaccataatgcaaactcaaccatttttttatgtctagaagaaaaaagagcacttgaacaagaactctgtaactttaagagcagatatgcagaaaagaatgggaacacagtagaatctgcaattagagcaagctataaatagaacttacagtttatgtaaaagaataccacaaaaccacaggggacattgcatagtaggtgagtaaacgtgaatgacctttaccagtgcatctaggaaggggaagaaattgatacacatttagcaactgtactgaaatattgcctcccaatgtcagtctggtcaaagcagggctggatttcattttatttttcagtttttcaccatctaaaccttaagcatttcttgagccgtaaaaattaagtactgggtcatgtgacgtctctcactgatgaatgaagattgtgtacatataatatcattacttctagaaaatttatgtatgtagtttacaaaataacatataaatggataatcaacctaaagggccaaccccataaaacataaaacatttgattgtagtttgcatttattaaaatcatttattacagcccagtttttctccatggccagtcagaggagcctgccctgttctctggtaggcaggtgaatgtgataagcagggagttagtgccttgggccatacctttctgaggcattttaattattttcaatatgcagtaaggacactgacacatgttcagaaagtcatgcaaatatccctttgctgaaaatatgtccaacaccctgaggcataggagagggtgaaaatgaaatttggaagagttaggagttcatgcaccatagcatgaaaggaaaaggatgcagggacccaaggctttttaagtgtaactagtctgcctgctccttctccatatacctactgaaatctcctgctttttatccagaagtgtgtatgactgagattctggttttggaacaaggtgaggacaggcaagatggtggtcttatttaattattcaatagagctgacattacaagacttgatcacctggaaagcaaaaagatgcatctgaaggcaggtcagctttttctttgtcttttctcaggattaatctaaaacaattatgatccacaacagatacagaaagttcttttctaaggccagtggtagagaaagcaacttatttgaggggctttggtcatcgtgttggctcctgaatcccttcagggcatttatattgctcagaaaatgtcacaagctatgaaattcagctccaacattctcccaagtcatcctagcctagaagcagaaatttcatggtattttcctgaggtgatgctagagattcacagcaatctgggagagcatgaaggacaggaatgtggtgagtatcctctggaggaaatcccagagcctggtatcactcttcacagaactttttcctagaagaggagacatggggtccaaatgtgactcaaaggcagtgatccacataggggccacagggagtgaaatgccagtcctggcttttttcccctcaaaatccgtctggttatattctatatccagttgaggcattctgggctgcccagggttttagaggctaaccttatggcagttctagggtgtgtccagttaagaagtgtccttagaagaccgatttgaccttgcacctaagagacatgaatatatattttcaagattggtccgatgtggctgtgcaggggatccttgatcaaagcaactttatagctcccccaacgccatctctggatgttaatgggatattgacgcagtgttaactgggcctcttttgttgctctcccttagaattacgcttttaccatcttgaagcccaatgcacctgtgtgtaggtctggcatttaggggtaagcaattgacacatcgactttattatggagatttctataaccaaataagtcctttagcccactagattccttcacaaactatcaatcccctataatcaaaaatcagaaaaggatctgtctgtctatctatctatctatccctctatccatctatctaccatctatctattgaccctctctcacatctctctgtcccttcctcccatataacataatgtccttttaggaacatctgaagctagcaatgtaatttaagtagttctataaacacaaatatcccagaaaataatagcagaactccctccctgtttttgtttatataagtaaaaaagagttttaaatgaattctcaagtatttgtaattttagatatctaagagtaagggaaattaaaaaaattttctattttggaaaattattgtcacccagtttataatttcatttagtataatattttctaaacagtgtctacaattgggaagactgcataatttactatgtcctaaaatagttttagttttctgagattattttcatgagaatgcagttataaaatcatgtggtataaaacagaatctcttcatgctaaaattgtattaataattaattggagaaaaagtatttcaccatgacaaatgagagactgtatggaaggagtgatgccatttcatggcagaaataatatagtaacatgtcattaaatacaagacatcatattaaattttatagttaatgtacaaggatatcaaaatatattaaaattcaaattggttatgtttgctaaaattctggtactggagataataattagagtttttccaatgtaattattaaaatgagaagaaacaaagaaaatgtttagtgggaacagaaaaacaattttctagagaaaaatctggttaccagtaaagtaaagcaatgtgaaataagagagaaatacggcacatgcttttggctcactgtgatgaggatatgatcttaatcaaagtcaggtctacagtcaacaaagacacaggtctaatagcaaaaaacttcagatgttaacttgtgtatgagtaattgcattaaattaaaacatgatgactaaattaacagtagttattagccttcagaacagagatgcctatgagagtatacaatatcaatgaagagttagaaaggatccaataccatgcatttaccaatgtattttatatgatgatttaataaaggtagtttttaagaactataactttttaattaaacatgcttttataaatgaaatattgagtagttgcaaaacaacacttacaaaatgcaatgtaaaatataaagattaaagaataatggtgtactatacacccatatacccagcatcctgtttaaggcaaataacaccactgttacctatctgtggaagatgctttgtttttttccttatcccatccctttcctttcttccttcctcagaattaatcactgttctgaacctgtttatctttatgttttttccatacatatttgtattcctgaatgaaattttatttttagtattgatcactttataaaacggatgttatctgtcaatttagaaagataaatacaaaataattgtattagttcattctcacactgctataaagaactacgtgagactgggtagtttataaagaaaagagatttaattgactcacaattccacagggtgtacaggaggcatggctgaggaggcctcaggaaacttacattcatggcggaaagactaaggggaagcaaggcacagtcttcacatggcagcaggagagagagagagagagagaagtgggaagtgctagacacttttaaaccatcagatcttgtgagaactcactcactatcataagaacagcaaggggaaaatccacctccatgatccagtcacctcccaccaggtgtctgccttaacactgggaattacaattcaacatgagatttgggtgaggacacagagccaagccatatcaataataaaatttacttttatccactttaaaataataaaaatacatttacaaaactaaattatggttttgataggtttcatatgtatttatatcttctgagatttatttacattgttgaaaatagctgggatttattaattttcagtgcagtataatgttcaatttgtttccacttaaagttgatggatatgtaggttactttctatcacagaatatatataacataattttataatgttacattacttttttgttcatgtctgctggtacacatatgtgcaacaggaagtgatatgtcatacatttccaacattactagagtatgccaaattttttgtgaaagtatttctaagaatttacacaatgtgatggagatcaactcttcgtttcttcttcttcctatgcacacaggtaaactacgtttagcagcctcccttttggttagaggaggctgcacagttagatgtcttgcaatggtatttcagcagtggagattgtgcctcagtctggcctgtaaaatccttccacatacagttcatttcaactctttccctcttcttgctggctgacaggagactacctcaggatggtcttagaagccacatattttgtttatttatttattatttgagacagggtctttctctgtcattcaagctggagtgcagtgatacaatcgtagctcactgtaaccacaaatgcctgagctcaagccatcctcccacctcagcctcccgagtagctggaattgcaggcacacctagattattattattattattttatggagatcaggtctcactatgttgcccagtgtggcctcgaacacctggcctcaaagcagtcctctggcttcagcatcccacagtgtggagattataggtgtgagccacctcaccgggcagaagccacatattggaggtaacagaggtacatgatgaaaggatattgggtccctgctacttgataactgggatatcttttttggtttacgttaaaaacaaaataaacatttctatattaaattacttttgaatttgtttgttatgcagttagcctactctaatagatatgtacctcctggcaggggatagtttctgcaacccttgaaactgtccaacttcatgacttaccaatgtgttgagtatgaaatatcataatcctaaggctagagtttacatttttttaatcactagtgagggcatctttttatgtgctaactggccatttggatttttctttctgggaagtgtttaagacttttgcccacttttatattgagctatttgccattttcttattgatttgtggacactacgtattctaacagaatacattatcactttcgtgctgtaaatatcttctcccaatctgcaacttgtcctttttctccctttatggtgacttcgatttttttttttgaatctcacttttaatgtaatggtatttattcattttttcctttattgtttgtactttttgccctatttaagaattagtttcctacctaaaagtcataaaggtactaacccatattgtgtcttacagttttataattttgataagacaatttaagtcattagcccaactggaaccattgtttactttttaaatttccatatggatacccaccacattcagctaatttattttaatttttagagatggaggtctccctatgttgcttaggctggctttgaactcctgttctcaagtattcctcctataactgcttctcaagaagctgagattataggcaagagctgagataataggcaagagccattatgaaatacccagcctggtattttataatgtctttctgaaggcttttctatttacccaatcaagatcttacaaatattttgataggtttcttatgatatactttataattattttccccaatttattaagatatacttgacaaataaaacttatatatattaatggtgtacaatgtgatgttgtgatatatgtatacgctgtaaaatgattaaattaagctaatcaacatatccatcacttcacatacttaacttttgggggatggagaacatttaaaatcttcttccttagcagttttcaggtatacaatgcattattattaactgtagtcaccttgctgtacaacagacctccagaacttattcatcctaactgaaactttgcatcttttgaccaacatctcctcattatagcttttgatgctattgtaaattatagccattatgaaactatatttctaactatttattactgctgtatgggaatgtgactggttttgcatatgtttataaggaaaaaacccttaagccatcatctttctaaggaaataatttagttgtaaaatttttgtgtgtttttgatgtttatggtcatatcattttcaaataagaatgactacgttttcatcctttccaaatgttataaatttcagctttcttgctgtgctattctggctaggacatctagcttaatgttgaatggaaataatgaagctaggcatattgatttttccctggaaacattttcaatgttataaaattaaatatgtttactgtaaagcttttttgctctgtagatatcaattgttaagctatgcttggtttgctaaaactgaatgttgacttttcatgtattcctttttgtgtctgtcaaaaatcatcatttgattagtctcttttaatctgttaatgtagtgaattacattattttctaaccatgcattcctgaaagcaacctaattttgtcaccgtattctatcttatttatgcattgcgaaatttaatttattaatatagagtttggattattacatctgtgttaattgaggagttgggtagaaattcctttttttctgcacgcaggaatagtttgtgtaagactggaattatttgttgtttgaatatttactagaattcactagtataaccaactgggcctggtgtgttcttttccgaaaggaattacgtaataatttaatttatttaatcattaaataattgctcaggctttttgttgtttcttgaatccattttggaaaattgtataaatttcaatttcttttcaaatttaatggcaccgtttctataatattgctattttttgcagcatgtgtgcttaaaccactttttcgttgctgacagtatttactgtgcctccttcattttctctagttcagccttgcactagtttgtgaattttattattcctttaaacaacaaacatttggctttattgatccttctttttcttgtatgtttatcttctatctcattaacttctgttttctccttattacttatttccttatcttgcactgggtttagtctaaatctaatctatattttccccatctcttgaataacatgagaatctgaacacatcagctcaatcacctccagctggctgtgtgatatttttgttctgtatattagctctattttgcacccctcacccaaagacattattaagtttttaaatatatatttgcttctacatctgttggctgcccagagcctccacctctgatcactttcttttggccaaagtgtatctttagaatgtcttttagtgaatatctgttggtcaaacacttgtttcatttattttcttttgtataaaaatgttatgggatctttgggggtgtcgcttttctggccagaaacctcggtggctggtggcacctttgcctgagttttgcctggggccactgggctcattaggcccacttggcctagcaggctgtgctcagcttatgctaccagcctggatatcatgcctccaagggtgagacaggcatggagcagcaaggggtatgtgagcaagcatgtgttccagccactgctgagacaagcctgctgctgctacagggtgggcagcaccaggtgccagcatgggcgctggctctccccaatgctgtggctgaaccaggcacaccacaagcaccttccccagctggcactgaggaatgcagtagcacctagaagctttgagacttcccaaaccacagggccccaaagagggagtcacagtcctggcttggggagctcccaggtctggggtccctgaagggctacagctcttctctcctttccttcacccaagatgtggccagcaaggagcatgattcagccctttttgtgttacagctcttttagccttgccatttagcaggtgctgagctcttgtcctacatccaggaagaatgaggtatgcatacaagcagaggatgagcaagatgaagaggagctttagtgagtgatagaacaactcatgggagacccacagtgggcccctcctttccatacccaaggtgtcctgataagtgctcagctccttgcagaaaggagaccctggagtgggaagctcctctacaggcaggtcatcccactgagcattcagctttcagcagagaagaggccctagaatgggtagctgctctctgcaggcaggtcatccggtcatctctgcagctcttggcagagaggaggccctggagtgggtgactgctctttgctggcaggtcgtctggttgtctccctgttgtcttttgtcctctcttcaagtctggctgagtctggggtttttatgggcctcagaggggaggaagtacgtgctgattgcccatgggtggccatgggtgggcccggggaaaagcaccacaagttcttcctccagatggtgggattggaggccaagcccccaggtttcaggccctttccgtcttgaaggtgggtcttcacgagggacccattccattctgtctggtagcatgtctgcctactgctgctgttcatggcgcccaggctgttcatgccaagggccacctgcagaccagtgctgggctgtcctcagcacccacttggcctaagtctggtggggctaagacagcaggggactggcatgttggcactgccccaagtgtgtgcacacctggcctgactgcgacagcacctgggctcagccctgactttgttctgagattggagccttcagtgggagcaggcacttctgagcctgcgggggtaggagggggacttccaaggcccccaaaagcacagaggtgcccggggctggagctgtagcaggctccagccatactcacagagctcctaccctgccatctcagaaggagtggggctcctgcttgtcctcacagagcatgcagtcctggctgcacacccttgcaataatagtccagaacaaaaagtgaaatagtctttgaagataaagatagtgtctctttctagagcaaaaggaaacattcttactgccaattatgaaataaaagattcaggttctctaaactcagggttcttctcctataaagcaaaccactgtgcgtgcaggtgctctctgacccactgtatactgtcttgtgggaattggtgcacagagacccagtgcaaaaatgatgagctctagttactcttatttctatgaattataaactattttccaactctgactcaggatattgtaccaatatccaagaaattgctagttggcaagcagggtaaaatttcatatatttcacagttcttagtacataagtcctgaataaatggaccaaatatataaaccaaccatttatattccctattcatgagttatgagagtacactaaattgtaaaataattaacatgatataagtaaaaaagcaaatgcccagatgaaatcataactattgagtagtttattgtgagggagttgttaaataatttttatgtatttttaaatgcaaggcagtaatgtatatatttattttattttttatttttaccatatatttcttaagtgtaaggtgcatcttatggattatcttataacccggatctcaaatatgattctggtgatttacaaaagcaggtccaggaagcctgcatcccacttctacttttcagtgccacacctgaggtctcactctggccccaaggtttctcaggtgccactgcctggattgtctgaaagaacccagtgcacagatatctcagaagtggaaagaagataacctcctttgggccaagctaaacactgtgggcactggaaatcaatgtctaaaaccttctccctttcattccttaggtgtttgtttattatataacaaaactgttgcctgcagaagaggtctatttaatgatactccttgtaatatacatgaacttttccaaattacctttaacatacattaactttttactcttctgttattcagctctgttttccagaaacatgttatcacataaggtatcttataaactcttctgacgggttctgcttagtgggggttagacacacaggaaaagatcagtatattcacattcacatattcttcagatgcctatgttacaatatccattatgagtaacacataaatgaatggcaagttttaatgcaaaagggtaaatgtgcaacataggtgtctgtaagacctaatataatgatattcagcagttgaatattatgacagaaaaaacagttttgtagagagaaagtaatgctctatctcaaggaattttaacttcctggaatttcagaataaaggtggggtgaagataaaagaagaaatgggaatgatgttattgtgagtggaaactacacatttccatttctttttaaagaaaacggttttgttcctaatttttggttcccataaagtttacaaatacacttttactctgataatacagcttttcaacgaggaaaacagtgatctaacacccataaatacaggtggggagacaattaacatccactaatgtttgtctacataaaccattcttttaatgtctttttttttaaaaaaaaaaacagttgcaaagagactacataatatatgtgggcaaaaaggcaattaaatgaatctcttgaaacactaagtgtataataagtaggattttataaacattcacatgattcacatcaaaatgatgacatcctaaaatgtattccttttaaaggatagattagtcaataaaatattacatatcttttaatactctggtacaatactttatatactgaaggaaaattaattgtaggtctagtcatcagcttaataagggatccttccctataatcttttgttaataaaagaattacagttgggtcataagtaaacaggcaaataattaattacatgatttgaggtttaggatcaaaactggtcaaaattagtttgatatacatcaaagttatacgacacagtaaaaccaactttaatatttttgccttgtatgaactgcccatatgtgaaaaaggaacacacttttcagtgatgaaagatacaataaactatattttggaacttacttgtcaagaggaagaaggaaaaaggatttcaacaaaattaagggctaatacagaccctaacaaaggcatcctgaatcagggaggccgtgtgcttgctatgtgtaaaacttgattcccccaacaacatacagaagacaaaaactgcactggatttgtagttatatctgcagtttaggtttccattatggatactaatctacaacaaaatactttacaattgcatatctttccacatccccctgaactaaaaataactcaagatgttattagttcttaaaatctccagtaaaataacccctaaaaaataatcctgaccaatttcttggctgtttccccagagcaactgggctttataaagaatgcacagaccctaagaaagtcctaccccacatttccattttaattgaagaaatgcataatgcagcctacaaaatcatcagtatattgaaccttatgaaaaaatgtataagttcgtgttaaagtttaatgtagaaaaggacagtagcattctacatgggccaagcataagagtaatagtaatagaaatgtgagttatccagacatcaagtcaaagattcattaacttaaaacagagaataacataaattaattttaccatccttgatgataatttacaaaaagtagtgggattaaggggaagagctttcatttgcaatagattttgccagataaggaaatgtgtaaagttagaaatttgacggtaaaatgcaaaagtatcatcttaagtttattgatacctgagtaaaaaaaaaaaatgaggaataagtatattcttggttgttttgaagcaatttagagaaaacataaatataattttatggtctactttttttttttttttttgagatggagttttgctcttgttgcccaggctggagggcaatggtacaatctcggctcactgcaacctctgcctcccaggttcaagcgattctcctgcctcagcctccaaagtagctgggattacaggcatgtgccaccatgcctggctaatttttttgtatttagtagacagcctgaccatgttggtcaggctggtctcgaactcctgacctcagatgatccacctgccttggcccccattgtgctgggatcacaggcatgagccaccacacccggcctatggtctaaaattcttaacaggaagatctttaagagagatgtggctctccaaaacaaaactcaatcaataaacttgagtcttatctattaaagaacatgtgcaaaatgtgaaaaaatggacttttcatcaaggatgtttacaaaagtgttttccaaaactgtatgagtaagaatgtctcttactggctggagctttctttcttttaaaatgatccaaaagagctcattttaatttgttaaaagcgagaaggttaagaaaggtataggtccttttttcttagatgctaagataacagacctacttaattcatattttgttggcatattttatccaagaaaattatctttgccttgaaaaggtaaaaacaaaagtacccataaggtcataaaaactcaagataggttttaacaagtgtttgttgttcaaaataccacactgagagttaaagacgatgaaacaaagtttaaaccgaacagaatcttggcctattggcataaattgggaccacctcaggaagaccagggtgtatgtttcctctacaaaaggcatttagtgctctaaatgagtctcctaaaaatcaacccctgaccacaccaagtaatcacagaagacatcttttaaccaagtaaggcttgttgtaacatgacattcgaaaagaaagataaatcaaggcaataacaaacaaacaaacaaaaaacttatttatcttattatttaaaagaaatgaggcagggctcagtgaaacatgcctgtactcccagcactttgggaggctgaggaggattgatcatctgacgtcaggagtcatttctaccaaaaatacgaagtattagccgggcgttgcagcaggcacctgtaatcccagctacttgggaggctgaggcaggagaattgcttgaatccaggaggtggaggttgcagtgagctgagatagcgccattgcactccattctgggcaacaagagcaaaactccatctcaaataaacaaataaataaataagaaatgaaattggttgcagcaattcccatcaagaagtagagttcatttccccacttcctgaatctgagctgttcttgtgacttgatttgaccaacagaacgcagcataaatgacactgtaatttctgagcctaggcctcaagagaccttgcaacttccactcttgcctgcttggaacctagccatcatgcaaagggccaagccagcctgcaggagaggccattgaaacctagctgtagctccagcccaatgctagacatgtgagtgaggctattcatgtccaaccacccctagctgacctgccaacttaccacaaacatatgagtgagcctagccaataccacatggaatagaggcacgttgtgccagatgagccctgcccaaatacctaatccagttaaattataagcaaataaatagttttaaatcacaaaaatagatcgatgatagatagatagatagatagatagatagatagatagatagagtcacctggcctgttgcaatgtattttcagtgttctaaagcaacatggggaacaggagataagtcagaaacctggctgttgacaatttcgaaattattaatacaaaagaagaatatatgatcttattcatcagtagacacagaatggcagtatttcagaatgagagttattaaaagaagtatcttcgtcacttagacatcatcactagaaggtcgcatgttttcactaataacaagtaaattcatatttatattcacgactatgtgaggtattttccacagtctcttcttgtgttcatgtgataagaggcaacaatttagtataacagatttccaacttattaatgaagatagtggatagcattagttctttcaacaaatatatactggggatatactcagtgtcattctgataaatgccaatgtcaacatggaaaagaattctctagggatataaatcatagtacataacattctattttactcccgttcttttaacagttttacttcttcatttgcccaaataataatggacccaaaacaactgaaataatcctttactacagaccaggggtagcgagactaatgtttatgttcattattatcaaacatttatagatataacgctctaccattagagtagtctaaagacacacttgtctcattaggtagtgacttacccagtgctggaggtagtgaaccatggtttaaacaatcatgttatagggatttacgggcaggctatacagaattagttgaattttgaattcagtgactgtatccttttcagcagcagaactacttgtttaaaggataattttgtgtactagcaccttaataaataaacacataaaagagaatggactgagaatgatggagctcacccatcctcacccttcattgactactccatctgaaggtctctagagtaagtgtcttctacagtcctttcagatttttctgttcttaattacgtgcatctattacaaagggagaatttcaatgacagagctaaaacaaactgcaaggaaagtcatatgaagttagaattaaccaaaaaaaaaaaaccttgaaatgagttaattcaaagtgtttaaaatagcctgtggtggatattgatgttatacagtgcaaataagcaataattaaaaacatttgcaattctttttaaaaaattaagaacagatatttatatcacagttccagagactgtgaagtgcaagaccaaggcgccagtgaggactgcacttggcttccaagatggtgccttgaatactacaacctccgaaggagatgaatgctgtttccccacgtggcagaaagtggaagggcaggaaaaaaatggactccttttgttaaacctttttagggcaccgaatcccattcatgaggggaggagtcctcacgacctaattacttcttaaaaatctcagctcttaatactatcacattggcaacatctgaatttcagaggagcaaattcaaataatagtggctgaactcagattgtctgtacaagagcagtggtgttttactctttccagtcctccaatacagcacatttcaccactgtgtaattaatatactttttaattaacgaaccctctagtgaagatttagataacaatatttaaagtatttgcaatggtcacttctggagggtgggtttatgattgggtgctttaaatgttatctagctgtccctggagtatagatttaatttaatgtaatttaattttttttttacctttaagttcaggggtacatgtgcaggtttgttacatatgtaaacttgtgtcatgggcatttactgtacagattatttcatcacccaagtattaagcttagtacccattagttattttttctgatcctctccttcctccaccctctgataggccccagtatctgttgttctgctgtatgtgtctatctgttttcatttagcccccactaataagtaagaagatatgatatttggttctctgttcctttgttagtttgctaaggataatggccttgagctctctccatgtccctgcaaaggacatgagctcattattttttatggctgcatagtattccatggtgtatatgtaccacattttctttatctagtctatctttgatgggcattgaggttgatttcatgtctttgctattgtgaatagtgctgcaatgaacatatgcatgcttctgtctttatgatagaacaatttatattcctttggatatatacccagtaatgcgattgctgggtcgaatggtagctctgtttttgggtctttaaggcatcacttcactcttttctacaatggttgaactaatttatactcccagcaacagtgtataggcattcctttttctctgcaacctcatcagcacctgttattttttgactttttaatgatagccattctgaccaatgtgagatggtatctcattgtggttttgatttgcatttctctaacggtcagtgatgttgaagtttttctcatatgcttcttcgctgcatgtaaaacatttgcagttctatttttgtgtcttggctgatgacaacctcaaggctaattttttaaaaatcatagtttacttttttgaaatgagaaaaacagaacatgccaaccataaaaaaatacaaaagttatacaaattagactataattgttaaaagttataattaaaagttatatatattaaaagttataattaaaagttatatatataattaaaagttatataattaaaagttataattgctaaaagttatacaaattagacaattacccattattccaccaagagattacaatttcccttcctgaaaaaaacttgtcattcagttgtgaggagttcagttgactgacagcctccagctgcagcactgtaatgatctgtgacaatgtttgagcaaaagtcctctttttcctggactattccaaagccatgaaatgagcatgacaggacatctaggtcctggctgttttggccatcggaggactcctccaaggagcaatatttgggttggcaaggacttgtcagatctacatagtagtttgagactttctttgtcaaattcttccttctcctccccttattttcacaggtatcagatatcagatctgcactatgagctaagcctttctctgctcaaacttgctacctcttatttaatttccataggtgttacacctacaacatttctccatcaaccttacataaacctcttgcacaccaactctctcttagcttcagctttctagaagactttagctgatgcacaattattacatttttatgctatattcctttattattttacatgcatattttatacacttgaaattatatacatgtaagtttgtatcctgtctttcaatgtctaggttattgcaaaaacttggtagttttttttaaattttattttactttagattcagggtgtacatgtacagatttgttacatggatatattgtataatggtggggtttgggcttccagtgaccatcatccaaacagtgaccattgtaaccaataggtaatttttcaacactcactttccttccaacctccccactttgggagctcccagtgtttgttgttttcattttgatgtccatgtgtactcactgtttagcttccacttataagtgagaacatatagtatttgatttctgtttctgagttatttcacttatgataatggcctccagctgcattcaagttgctgcaaaagacgtgattttgttcttttttttatagctgtgtagtattctgtgatgtatatataccacattttttaatccaagcaaccactgatgaacacttaggttgattccatgactttgctattgaatagtgctgcaataaacatacaagtgctggtatctttttgataaaataatttattttcccttggattgatacccagtagtgggattgttgggtcacatggtagttatattattagatctttgggaaatctccatacttttttccatggaggttgtactaatgtacattctcaccaacagtgttataagcatacccttttctccacattcatgccaaccgctgttgcttttgactttttaataatagccattctgactggtgaaagatgatatcttattgtggtttaatttgtatttatctgatgtttaaaaaaaggttgagcattttctcatatgtttgttggccacttgcatgtcttcttttgagaagtgtctagtcatgacttttgcccactttttagtgggttttgttttcttcttgtggagttgtttgagttctttttattaggttggtgtaaaggtaattgtggtttttgccactacttttgcacaaacctaatagaatcttgatatgaattctctggcagaagcataatttgcaaatgttttctcccattctgtaggttgcctgtttactctactgattatttctttcgctgtgcagaagctttttagtttaattaagttacatttgtctatttttgtttttgttgcatttgcttttggggtgttagtcataaattctttgcctaggccaaggtccagaagagttttacctaggttttcttcttggacttacatcttttcaggttttatatttaagtctttaattcaccttgagttatttttgtttatggtgagagagaggtgtccagtttcatttttctgcatagggctgccctatttttccggcaccatttattgaataggaagtcctttccccccgcccccttttttttggtcaactttattgaagttcagttggttgtaagtatgtggctttatttatgggttctctgttccatttcattgatctatgtgtctattttaaacaacagtgccaggttgttttagttactatagctttatagtataatttaaagtcaggtaatgtgatgcctccagctttgttcttttcacttaggattgctttagctattcaggttcttttttagttacatatacattttaggattttttttctaattctgggaagaatgatattggtagttttgatgagaattgaattgaatctgtagattgctttgggaagcatagtcattttaactacattgattctttcaaccgataggcatgggatgtttttccacttgttggtgtcatctgtaagttctttcattagtgttttgtagttcttcttgtagagatatttcacctccttagttaaatatattcctaggtatttgtgtgtgtagctattgtaaatgggattgttattgattttgttctcatcttaaatgttattgatatatagaaatcctactgatttttatacactgattttgtattctgaaactatactgaagttgtttatcaagtctaggagtattttggtggagtctttcaggttttctatgtgtaagatcatgtcatcagtgaatagagataatttgacttcaatgtttccaatttggatgccttttatttctttctcttgcctgattgctcttgctagggcttctagcattatatttaataggagtggtgagagtggacattcttgtcttgttccagttctcgggaggaatgctcccagcttttgccagttcagtgtgatgttggctgtgggtttgtcatagatggctcttatcattttgaagtatgttccttcaatacttagtttattgagggtttgtattatgaagggatgttaaaacatactaaaactaatatttctttagtgcactgtaatttaaaacattagaaacagtaagatgactattgtagttctttgtaaaaatttatcaagtatagtttgaatagtgcttgccttctcctcatataaataatgatgtgaagcaaatatcttattaatgccttggtgaattgtcatgctcctttctaaatctggacgagcttccaacactttatcccttgtactttaaatgttgtgaaatacctctgagagttctttaattttgctgggacatcgcttattcttttcatcacaactactttccttatttacattaataaattcatcctaggtaaattcttctggcagcatatctagagtttctccaattgcagcagtatcaatgttctgatagtcatctatttttttctaaaactccattagtgtacaatccaaatttcacttctaacgttattactttttgcttctttgctgcactttcatttttcttggccgatttcctctttccattttccatttttgtaaaatatcatgtggattaattatagggagacaacaaggcaacacaaccaaatgctttcttatctaagtaaacaaaataacagatgcgtagtgaccaaacactgacagactttgaaagaagttctgttattggtaactgatcatgatgcatatttgctatttatgaagtgatttgtaggctaaagagatagcggaaaagtttataacttatgcaattactcacaggtaatataccctgccaacttaatgtgaactctgttattgggtgatttgtgtgatttaactaaatcaagataattaaactctgtgcatattggaaccatgcaaagaggggactgtttgtatataattaaaacaaggtatgataaccacatgctatgaagaattgtacactatttagtcataagagaaaatatgcaatgtgaatcagttctagagatctgctgtacaacataatgtctatgtttaaaattcagtattgtacacttaaaaatttgttaagaaggaagatcttatattgagtattttgacccccaacacacacacacacacacacacacacacacacacacacgaacacaaaaaatcttttggagggatggatatgttcataatcttaattgtgtggatggtatcatacataggtatatgcatgtgctgaaacgcatcagattgtgtaccttaaacatgtggcagttttttgttatagcaattatacctcaataaaattgtttgagagagaaagagagagaataccaatcttaaatttataaagggtttaaaaatggcctcccacaataattaatattaacattgggatccataagtaaccaaatgaagaaataatgttcctaactgaagaatattcttattgcagatcacacaattgagaaggagcatagcatatataaggatttaagtttgatgtgcctggaatgcaaagtggagaaggtcagaagtcatgaaggagatgtatgatgtgttttggattttggattttattcttcttgggaagtcactgaagaattttgatggaaacatagttaacatggcccagttttcattttaggggtatcaatgtgaagaatagattagaattggcaaggccaggctgttaaggagaaaacttaggaagtgattactgtaatttaacagagaagagtcctggcctgagtgtgtatgctaatattaaaaaatgaaagtaaaaaaattaatggtttctttagaagatagaactgttagactgggcgatgattagatatgtgttagggtagggaggcaagtatgaagatggagaagctgtctagaatgatatcaagagtaagttagtgtctgttggtgtgggtcattgaaatgccactgaaagatctcaatttttaatccaaggcagggaagttgggggtgaaggatgatgaagttaactttgaaacaattgagtttgagtcacttgtggccaatgaaatggagacatcctgaatggatgtggctatttaggcttaaaactcagaatcaagagctgtagggtttgaaagtccttgcacatagatgataattaaaagcatataagtggattcaatctccctaggattgtgagaagaataattgtagtataggattaagacagaatggaacttagtgacaccataatctaagttgttggggcaattagaagaagaatctctctgaaggatgtattatgtctttccaaattataatggctaaatactaatttttcttaacaaacaataatgtcaacagttataccttaggaatgatattttcatttatattgttccaaattttttaagtggataacttcaaatttcaaatttttaatttttacttcagtgcttccatcactttaaattcctcatcatgaagatgatgtgctagaaatagcaagaatgtatctattttgctgttacacttatggctttgctttattaataaagcatatggaagctgattttagttattagtaaaatatatgataaataaattgcatgtttttcaaggaacaacactgttaggaccttgaaaacgtaattttcaagaaaatcttataaaatgagaatattctgagtcactaactcggattgttagaatctgagttagtgactcagaatgttctcattttttaatattttcttctctataaatttttaaccatcttttatgttggggagacagaaaatgattatagttcagatgtcaagaggtttgaaaaggaaattactcacttcaatgactaaaatcagcttttggccctttgtctaaaatattccttttcagaaaatttgcttttggcaatcattcatcaattttaaaaaatatgttcaaatgactgtattaaaatgtcaccatttacatatatttgtccataataatgagttaggatgaattctcaaatttaattttaaagtggacttaatgaagtttctttttttagagagtgattataatagcaggtttacgtaagtgtttattaaattttctgtgatgtagatgacaagcaatatgttaaatacaatttaatcatatacatcatatagtacaaatacaaatacatcatatagtagaaggaggaccaaccatccattataaggaaaataagttaatagcgggtggcaaggtaaacatgtgttttaaagttttggattatattacagtatctaactttatagtcagtgaggtgatatctaccattagagtctggttttcctgggaaatctgctcttggcttttgctgtttacagacagaattcactgggtaaatcttggtcatgcacattgaatgcataacagggtatagagtgaagtgcctgaagatacctgtttgaaaaaggaaaatatggcatttgttaaagttaattcaaagacatatgtgaactctcttgtcatgcttttgtaactgtggtatttttagagaaaaaagaatttcaagaagctctcaatacttcaagtaaaaacaaaactaatatcttattcagaattcaggtctgtagctaactgcctgacttcaagctaaatcctaaaacgtgatatgccaaattatcgtacataatgtactggaggtttgccataaacatgaggactcagcagcagccacagttgcttaatgtcagtctgagcaatcagatcatattcagtgcttttcttctccactgtactattttgaaatgtcatattatgctgcatcactttgatagcagccttgtctgcttcctttatctttattagctgccttttgtcctttctttgcaattcctacacattgtttttataacctaattccataccttatttgttactgtaaatagcatccaattcttcttgagctgccaccatgaaatcttccatttccttacctttcagccaccttagcaggtatctaaattccctttatagcattttttattgaataaattaatttttgtagcctcctttaccataccaccatctatgagttagacttacagtttaataaaacaaaacacaatcacaaccctaaatcctcaaaatgtactttggtagagaacaaaagggatcagccaattctagttatacctcctctgagcatctgggaagttctctttcacagcccctcagtcaggtacaaattaactagtcctactcaataagttgtgaacaaacaggtcaaagaatttaattaccaatgaggaaacgtccaaaacccttatcccctgccaaaagaagactgtctgttcgtggcaccttcccatgaagtggttgggtgttccatgacatgaagaggctgtgtgttcaatgaacatggtggaacttgcaaaaaccgagttcctgagtgactacttgaagcagacccttgattaacatgcagtaggattaagaaataaactttacttttaatgagctattgagattgctgggttattttgttactgcagcattaccttgtttattctgactaatactcaaacaaaaccaaatttaaaaataagcacatgtcattttacagatacaatacgtctataatgctgccacaggtagagacaatgctcacaagactactatctaaggtgctgtaaagttaggaggctttaaccatgccatgaactcttggagcacaacttttaatgttacctattcatataattgaggaagctataacaaggacaatgtgatatcccatgtatttttaatgagagaacatgagtaacccagaaagattgtattcaaaagttcagacttttctaaatgtcgcctatagttatttatttctatttaattcttttgtttgtaaaatagagtctaaaacagacagaatgggaacttgcatttgattctttatgagtcaactgaattctatttagttgaattcaattcaatccagacactttcaataaagtataacacttgaaatttcaaacaccagtgtataaacccaaaccttttcctccatgccttccaataatagatgtaatcagtctttttaaatttctatagcatgaaggtataaactcatttcttattttcttgtttttactccacaaccagtgaaagtccctttgagtcaattagcatgaccctaacttatgtttaatgactttataatcttgcaatatgagccataaattttcatgtaattcccctattgatggacattcactttatttccagttagttttattatgaatactaatgatataatctgtgatctgaattgcaagtattttgttcataattttaaaaatagtgcttttattcacctggaatttagttttgaatagagcataggataatggaacaattttatgttattttagcatacaattttatattctttttaaaccaggagccagttgcatcatcataatattctcagcagactaaacttctacctttgtcagatattaaaatgtcctatgaatgtaggtttatttttaaaattgctaggctcttctacaaacatttgtctattttttgccaatatcataattatttaaagtgaatttataatcaattttgatatggtggcttgcaataaaattcctctgtagtgtgatggtgtcatttcactgtcttctcctctcgggtgttgctgatgaagctcaatgtctttcagtttctttttcattgtaacttgtttcacttgaaagttttaagattatccctttctccttagagttcagaaatattttctaaatttttttttcctacatgtgtatcttttcttctcaatctaccaagagactacagggatttgttatgtaatttatagaacattttctctatcatgtctttaatcattcctcttttgtcccagttcttacattgccttgtagaaattctcttacttgcatgtttggtctcttagacttctgaaagtattatctttcccctcattctcatttcttcatgttcttgccctctatgttgggacatagttgactcccttgatcgtctgggtcacttctacatatctcctttgattcatgtattaaattacttatttccacagtctcccaagtgctgtacttgaatttcttgaagggttcttattaattccttactcaagttgtcaagtctttactctaactgctctattggcccggcacgagttctgttgttctgatgtattttccttgaatggattgttagttttctttctttgcttactggaacttgggtctttgtgttagagtttccaagagaggacaatcactaaggcaggaagtcatcacagacccacagtgcctcccctttccccagactgggagtgtagaaataggccaactgtctcctgccttctgtcaaagcaccccaaggaagtgtctctgttccctctggttcttgatcttctagacatagaggacaaataggcagctcctctgggcctcccaagggcaggaacaataaacacatccatatgactatctgatggtcctcattgctgctgtttatgctcacagctgtccttgataacctctggttatccacagaggttgtactattatatggtatgaagccagaaaagttgatggggtgtgatactttgatgagatcaaaactagcactcctgactgcattctggactctcctctgctgcccattctttaaacttccctgtccattgattgtgtaaatcttagtgcaatctgtggattctgaatgtgtttcaatgcttctgtgttaatggagacttattagaaagaaaggtctttaaaggcaggagttatatgttctatttgattgaactcaaagaacatatgcagtgctctgtactagtggatattgaatcaatgctgttggctgactgaaatagcttcaatatggctaggttagtgggaaagaggagtggttctttcattttcttttactgcactacagtttttgttttactttatgaacatattcaatgatttaggttttctcaataatatttgagtatctgcattttaaaaaaatgtaactagtgtcaatataagaaggttatattagatattttctctctgatttatatttaataaaaggggctttatattgtgctaatgatttagtagatattgcattttttttcttgaagaggtgagattataatgaaacacaaataaaatttgaagttccagaggtctagtctttgtaagcttttcttttataaaatgaattctatttgcaccaaaatgaatggtaaaagctttatttgtatgtattttttgttttattttgtttttcgttatactcctctcagctcatacctagtaagaggcctttaaactactaagctagtatgtgtgtgcttttttagttatctaccaattcctgcatgacaatcaaaatattcccatggataatgaacaggtgaagtaaaatattttttacttcaatatttttttacaaaataatgacacactgaaaaattggtttattagccacacagcagtgttctagaaccctcttggattattttaggctcattaaaatagtactattattgtaacaagaaacccatatgtacaaaaacattgaaaggatgcttcctatttgtgaatatcaagtcacttttcttttccagcgttattatcctccacttggagagcataaagggaaatgccatgaggttaagagacttccttatggccaacagttaatctgttgcaggggtcaaaagagaacttcccatgcaatagtctggccttgctaatacatagacatgattccttcatgtagggcagcttggactgaaaacactacaggggggaaataaataaataaaacgtgagcgctatgtggccaagttgcttctttgtttgctgaaagacaacgcaagacaaaggaggctctatgttccacaggaagtaaggaggcaaatttgctcatttgtcttcagaacacacatgcttattgctacctgcattcagttgacatatacgccatccaaatgtacttcatgctcagactacagtcacgtaccattctccaactatatgaactgttcaattttagatgtgtgaacctccagaactgtgaaataaacaacctcagtcaacatcaagcagaattcaaagaagtctaaagtcttaataattgtctgttcagtctgggaggaaaggactaaaatggcatgaatccaggtaggcggagatttccccctcctgcttgctacataggatagcacatgagaatccatagttaggactttaaacaaacagagttaccagtgagaaaggaggaagatgttttctgaaggagaaaaaagtgtagaagttttagctcaactgctaaatttgaaatgttggcttactcataagacacaaatggaagaggctatttctttaaaatcacagctggaaagaacttttttttatgctagaaaaaattgaccaagtttatggaaaacaaaactaaataggaattattaacaacttcaacatacccagaagtcttttactgagttagaaaagagcatgatagagaacaaatgttatgagagaaaaagaccgctaacaatgatattaaatgggcccacttttcctcaaaatcttgcagttctctgcagtagaatactcacatacatacccagtattcattgttatggatcctacttgctacagacagggtctttatcctcattcataatgtttctgtcttgccgtactttagggtgcaagggtcataagggagcctcctctgctcgtgcacactggacagccttgttcctagtctcccacagtgccctggcatacctctctcatagctctccaaccatgatcagtgggactgggcaatgcctcagattagactagaagctccctgatagcaaagagcctgtgtgattcttctctgtactctaagttccttgcatagcacatagcaaagataaagcactcaaacatatttgaactaaagggagaatcaatttgttctaccacaagtgaaaggtgaagtttactgtaaatgtgatgactgttgaaccaaatctaaatagcctaagctgtaattaacagccttcatttggtttgtaaaatgttaccttgatttctttattgcataacattctccaagttttcaaagtttggatcagaaatctgcacttgcaggatttctcctttcttcatctaaaagtagagcacatattcttaaatcttacccctctcaagtgagttctttttcttcttgtccaaattgtgtgtggggtggggtgggggcacagcccggattttccttatttcagtcaacagtctaaattcaagggtccagacacttaacaaatagcttcaaaatgtccttcacattttctcataggtgatccaccctaccacatattgtctcctaatggccgtccagtttatcctggagcccttgcatgacacaggcctatcgaagcataggaggtaagtatcatgaagattcagggtcctgttacactggcgatgttttcagtgtatcagtggcatagggtgtgtcagacaatctcctataagacaaatgacagatcattacatctcacacctcttaccctgagaaagaaatgcagaaggcagtgacctctgagttgattactacatgataattaaaggggaatgaaagatggcattcttgaccaagtaaagagcataagtcaaggtctaaaggtatgaaacagcctgatttctatagggaagcaaaagcaatttgatataattagagtataaactgcaaggcaagaagtgttgagagaggtgattagaaagacagagctgaaacaacaggcttaaccactgaagggtcttaagtaggagaccctttcttggtctttccagaaagcagaaactgaggcgatgtttgtgggctacaaatttcctgaaaatgttatcacagaaaattaggtgtgagggaaaaaggaagcaacacagggcagaaggaagactgaagtgaggatgctactgagctatccagtacaactggtcacttcgtcttgcaagatggtcttctgagaaataacaagaaaaactgaatctaaagatagcctgttcagaagagaagggaataggaattttatctgccacttttcaatttccatttgtcaggatttcacctcgttgcgtatcagggctttatatttccttggtgtgtcaggatcaagtactcaatagtgtaccaggagctgtttctcaaacagtgagaatttctgtgactcagaaggtatagtcttgctccagaaactgaggtatttgcattgttaccctcctactgagggttatcagttactccacacagcatttttacctatcagaagcatctctactgccatcaaaacttcagggtcatagagtatgtttgtgtggaaccttaggtcatagtctgacttactgcagaaacctctcttgctggctgtcttctgaataaatcaattggatttgcattaacaaaggtattctttgctacctacaaactccaaagaattcaacaaatgttctacttttccttatcagaaggagatttatattagagactattagggataggaaaaaaagtgtttctcctactctcacaaaccactcaacaccacacttctgacaccagatgtgtgaggattatttccccatacacaaagtacttcttcagcagacaccagctgggtgtgctgtaattcaattctgacactattttcctgtacatagtgttagatctcacagattgaggattcagttccacaagactcacacctccccacatcagataccaactgcaagtcccatgttgtgacctgtacttctgacagaccagctacaaaatgcaggctcttatgactccctcctcaggtttgaataatttgctagatcagctcatagaactcagggaaacactttacttacacttgcacccacttattataaagtatattacaaaggactcagatgagtatccagccagttgtaagagaagcataaagcatggcatatgagaaggggtatggagcttccatgccccctccactgcaccactctgcaagaccctccacgtgtttaactatctgaattctcctgaactctgccgttttcagtttttatgaaagcttcattacgtaggcatgactgactatatcgttgtctattggtgatctctcagccttcagccctctctctcccttccagagattggcaggtggggctaaatgccttgggttttctggtggccatcccctactgtgatgtttcctaggagccctcagctaccagccacctcattagcatacaaagacactcatcactggagattctaagggttttaggaactgtgtgccaggaaatggggatgaagaccaaatatatatttcacaatattacagagatgatgtctttacatatctaagaccactgagccaccaaaacttcaacttgtgtgacagggccctgaatctttgtcaagtttatcttcaacttctgccaagcatgtgtcatattaggaccttaagatacttaccactttctactcaccatgttcaaatagcattctgccactagtatagtggatctatacgacgttctgaggaattcaagatatctaatgttcctgaaaactatattttgacagaaagctgaacagtaggtctggagcaagagagtaaatatgtactatcatcttttctatgtaaaagtgaacttctttgtctccctattgatggggttaaaaaaatgcatttgccagattaacatctgcaaaccaagtgtcattggctgtgttgatctagtaccacagctgctttacttttaaatttatgatagtccattttcatccatcacaatacatccgttttgtgtggtggctagatgaatgacaatatcataaaggaccactactcaaatcttttaagcctattaaggaaatgcttctctgtatttcctcgcaggattcagtttttcttctgattatctattttgactaggagcagaaactttcatgtctttcagttgcctttttattttttttaaatcatagggcccttattccaccggtcagggcagtcctttccagtttttaagtctatgtatcaaaattgtatacttaggaattcaggaattaaccaaaggatgagtttcaggacttgttgtgcccattgttagcttaaatcaaaactttaaaatttatcctctataagccccttttctcaccagaagatcacagtggcattccaggtcccttggtatcacctcagaccctataacagttgattaaaaatgtagatattgttctttcttagtatatagttattatgatacatgatgttaggtcagcaatttgaggaagaagcagaatattcaatgtatatacctacaatggtgttgcaagatacttatacaagggaaccatgttttccctttaatcagtgagcactggatccggaaacttgcttaaatttggaaaattaacaaaagaccgtggttttacacactagtggctgataccagaattctgccagctagttctcattttttaaaattatatggtttgataaaacctctggccactgttcactatttgcctccagattctgcataatcccttagctatgccacagattcctgtgagtgaaagcacccttaaggtcattctggccttcatgctcaatatagtaatatacatacctttcctctgacttttaagtgctactccatggtttctgcaattccagaatcccatgatctctattcatattaggcttcatcttccacagtcaacctgactttacaggggttagcaatcatgatgttgttcaaagaagttaatatctacctactttctcctgtacattttttatggtcttagtggaggaagtgtccttactgctcagtaaacttatcaggctgtagatttttcagttcttatatagtctatttacattaacatttctaccttattgagccttctaccctttgagctttctataccttagtctataccttttatcttcacttcatttacaataaaccataataatgtcgaagcttcacagagtcattctaataaattacctgataggttatgagtgttcttttcagaacattgaactctgagtcacaggtcaatatttgcatgaagaagttctcttctatccatctttatagatctctattctaatctagaattttccagattactcttaaatgtgtttcttggtccctgctatgacatattaaccaggcaaatgcagaaatcgcccaccttactaccaaagacagtttccggactgtcgtaaatagctttgtagtcttatttagatagagagataggtgggcttttgaggaggtcagtgcatctagaatttgcagagcagaataaccaaaagagaggaaggaagaaaaagagagataaatcttcagaagggtctcccttcctctgtttgagtttaatagaaactataaagtcagagttccaagaagctccacaaaccccaagcagaagaaacacagaaaaacacaccaaggcatattatggtcaaattgctgaaaactactaataaagacaaaacattaaaagcagaaaggaagaaaaagacatgctacatacatacatattgtacattagctaagcaggatattcctacactcctgtgccaatatttcattctctgccatttaaatgatgttgatcagattttctccttggatcctctacacatgactacacaaaacaacccagacttgtgtgaaatgattcatctgttctcagcaattagtgaagcaaaaatatatcctgtggttaagaaaatgtgtttgagcatagatcagcctttctttatgaatgcctaggtagacaacccagttagccagatcataagttgatcatcagtgtaattttcaccccataacatctatgtcacaggctattaaaagatcaatgccagaattaacagtcatccaaatgctgaccctagcacaagaaggcagtagaatgaaacagtttaaaagttagaactctggaattggacttcctgggttaaaatcatgactattgtgtattaattttgagaccctggacaagttacaaagctccatttccctatacgtagataatgtataataaaagaaaataatcttataagatttttaagaggattcattgaagagaaatgctatttcgcttagccctgtgtctgcatatactaaaccctccactaaaagttgggtacacagctcggtgtggtggctcatgcctgtaatcccagcactttgggatgagattacaggcatgagccaagatgagaggatcgcttgaaccaggagttcaagaccagcctaggcaacatggtgaaacccatttctacaaaaaatacaaaaaattagccagttgtggtggcgcatacctgctactggtgaggctgagatgagaggatcacctgagccctgcaggtcaaggcttcagtgagctgtaatggctccactggactctagcctgagcaacagagtgagacctagtctcaaaaacaaaaaaaaagttagataaatggagaggaatgactactttaaccatcattgtttaacaaaactttgtctcatgataatcacaactttcacaatatgtttgtgtttttttaatctagaaaccagtatacttcctctacagcagcattttagtagacaaatgaataggtagcattttgccagacaaatgaacctaggcatgttcctattgctggccggagttgggtgaggtagccacctcagggagagtgttggtctgtaattaggagctaggaatacgcatgtggggcttaccctaccagttaatctttagaatgaaattattcttgtctttcaccaactcagccccctgctggggcatcctttgtgttaaattaaacaagttttcctggtctaatcctatttctgtaatgtgggtaatagaaagtagttaataagagaagcatgcctaattaaaatcaggtgttggggtctttttgcaatggtgatacagggcggatacagtttaaatgatgtttaaacccatatacataaaaatatttacaattaggaaaaaaagagaaaaataaggagagaaatgcattgctttttgagtgcagtgctactgcctctagttaatgcaacatagtgaatgtcaaattcttggcaaactcaccagacaggaatgatgctcctccttaattctcctcctgtgggtgagtaaggggtaaagaggaagctgagtgttcacttatacagagttgttgggggaaaactcccagctatgggaaaactgtggggtagtaagcagggttgctccccagcctcacccctgcagtgatcttgataatattgttaaatgaagtaaagcagcatatgtataaagaataaacagttataatttcaatttttcatataaaagtatatcatttttgtatggtggaataatctttaatttcctatttttcaaggtttctatactgaacatgtaatactttactaatcagaaaataaacatttttatactgttgaaaacaagttttcatgatcttgctatattctgtatcacatgaacggaaggttttgaacttttaaatatatggatatgaggttaattgaatatatttaatatccaacagtaagtaatcatattgttgagaaaaaagagagtctttcaagttcttgaataaattttagactaaatcaattaaaatttagaaatttaaaaatatgtgaggtatatttaatataacctctaaagtatatttttgaagtatatgggaaaattgcataatactcagaaaaattaatgtataagttcctcttttaagttccatagagtttgacattttactactaaatataagccttttgaaatactcaatattgtagttattagctacctttctccaatagctaagttgcagtcctaacgaacagtggaataaattaaatagataatgttttaggatttttttcaccatattgtgttcacttttcagtgttttgtctttttttttaatagtgttctctggagggaacatttttctgtgaggtaattctacaaacaaatgtgagaaaactacaagcagagtcagaagttgatgaaagttaataggttaaaaaaataagctccactgctactctttgttttttggtactaccgctaccatttaatgaatatctccacatctaagccttgtgcagtttgccttaatgcatcattttatttaatcctcacacaaccatatgtaggtataaattagtatttccattttaaaagtgaataatttgagtgtggaagagtttaagtaacataagaatgactctgagttagaatacctttctgaattcttctttgtttgttttgtcttattcacattgtgttattgttagatgagtgattgtgaataactggtacctttaagagcaacactctccactggaagaaagatgtcacatgttccaaagacccattaaagatgctcaagggaccaagaagagggttcgacttagtaaagccactccagtacttcactcttgcttatatctctaaatgtggctgcctcttctggctcatgtgtatagacttagataaataattagaaaagtaactattatttttagaggaattaccacaaccagggtctgtactaagcacctaaaattagatgtttttatttaattttcacaacttaaagacaggtacaatgatcacattttgcagatgaatacactgaatctcagggtgactaaatgttttcatcaaagtcacaaaggtgattaatgacacagccagaatttgaacctaggctggcaagttgaaaccttaggctcttgctaacataccatataacattttccccctagtttctactttcacatgtgacatttcttggtgcctacttgtgcgactgtatccctgacttctcccctacatttagtgtggccttatgtctgcttcccaaaaatgtctttgtttacatcagttgtcctggtcttctgtgtgtttagacccacattcattctcaaaagggactaagtgtagagaacgaattatatggtcaccttaccaaaagccaatgaagatatatgctggaattcacctgatatctcattgtgagccagccccgcatctgagatccgtctctgctcagggccattgcagtttctctgacacataggaaaacaagtaattctggtcatacagagactatatgactaagaaattcagcatctggaaaccagatttttaataacaatgaaggtgagaatattattcatattaccaacctcctccagaaaatacctcggaagtgtgctcaaggttgccgtggcaatcaggaccttattaaaagttagtttaaagattattaactgaaagtattataagttaaaattgtttaaggttgaaatagatgcgtcagagatttttttaagagcatctctgaaactgtgccttgaaaaacagtataaacagctaagttgagttgtaacaactgacaaacagaaaatattctggtatcctgattacattcttctattagtacactgtaacagtttctctagaaatacaccgttctcagttctttcaaaatattttctttcttcaagagccccttactgatagttttgaatcttgatgatctgttaagactattatttatcagtggcctatagtcatatccatgatgtccaaggaggagacaggagctgtttggtccatcctgaaattacagctgatactagaaataatgtaagccaagtgaatgcttattttatgtaagactacagatgcttagattcattgcaaattttactgagtagctaaaacatgtaataatgttcaagaaaatgtaagtactgtatttagaattgatacaagttgcaaagacgcctttaagaacatctgatttcctaagtaatcttttcatttaacaaatttcatggtatatagatttgagaaaaccagatgctcagaaatatgctgaaattgagtattataactttaagtgccacaaaatggagtcaagcttccaaaccttccctctgcctgctctgccgtgtgtttttcctgcatataccagtaaaaggtcctgatattttctttttaattgctatacttccgcagtcctaggaatttggggatcagtttgggatgaagaatcatgccaggaagataaattacattcatatgtcagatattgcctcacaatgctatctagctcagtaggctataaggagcccccactcaccaggccaggctccagccaaaaaataaataaatatataaataaaagaacacctactgtttctccatcaagggcaactctctcagagggcaaacaaaagcaacagagggaggccaaccatatccatgcagtactatgggttgctatgcaaccctccgtgcaagttgggcagcaacagatggacactttgaatagaattaatgcccctctgacccatgttttaaatagtacccaaacctactgcctgatgaattctattaactataggcatacttacacatataaaatatggcatcataactgacattgttattaccctctttactaaaataaagtcataaatccattgcaaaatttgagaccgataatattcaatgagatatttctatttttttccttttttcatgataaatgaatcactgatgtctcataaccttgggctacatatttccttatagtgttgctctggttttatatgcaaaagtgcaatgcctgctctgagtttcagcttcagttttacactgagtccagcttcttcctcaatcattctcacgtgtgggctctgggtattgtgtaagagacctctttttattgtaactttaagaaagaacataacatagaataaatattttatagatctttgtggggacaatgttgtaactttattcctgattgaacaatcaatctaaaggctatacccgaagccccaaaagttctttgtccatctgccttctgcctcagccaagtttaagctacttttcatcccttgtagtgagtagatatcaaaagaaatcagtatgccctcaagattattaggataagatccactctctggtcgcttaaattttatatactaggtaacttaggttgttagaacctaaaagagagggatatcaatgctaaaaaaaatctaggagtacacaatctcatattggtggcaacaagcagtttttaatttttaatggagcatatgtatgataagatatcttaataaagtggtaagataagatatcttaataaagatcacagagcattgacttagaggaaagaaactggagaaagggctctggaaagtttcttttcttgatatcagtgtccttacctgtaaagtaaagtaaagaggttttggccagataattcctttagccaaaagttaaaggttccaacttttccattctctgaaagatcaaagacgtcattaaaataaaatgagtgggaatttcatttctatcagaggataaagatggggataatatcaaagctcaatatccacatctaattacaaaatccttctgttctgatgatggaaaatacagaagaaatgggaagcccttggactctaggacctagaatattcagcggggctcctgtctccagtctgtgcttccattccttggagatgctcatacccaggggaagagaggtgcttgcccattgattatgtgacttttgcaaaattttctatcccactccgtattctcttgctagaaccgtccttctgtggaggaggcaacagcacgtgtgcctccagttttgaaagtggtgctgcttctctgtcaggcctcctcctgctgcccagtatgtcttcgttttgaaaatatgagctcagttttccatgactgggcacacaggcttgcagtcttcttgctaggagtcattacttatatatgcctgcacgtacagatatgcttacatacggactcacgcaaaatatttgcttgtttttgtttgtttgtgctcccacctcccttgaaggccctggaggtgggaagcgtggcatcttaaattattttgtcatctctggcaagatttagtgttaatgactttatgatgtcttaccacttcactaccacctgaaataatcacgtagaagcaattcagttcagtagctacttcctgtctttgtagtcccatgtactttctgatgagacaagagatttgatttagtcctacatttattctggtaattatcatactgtgtcccattgaagtctcaagttacatatcttttgagaactgtaactccctattatttcactatataatgttttcaattctattacacttaatacacgtatttcaaaaataatcttattttattttagagactatgacatgttcaataggttataaataataaaaaacatgactattagaaataaatgagtatcaatagatgaaatgtgtttggatgctgtaaccccatatgtattttgtttaaatccacagtgattgactctgtttctaagaccataggttccaaattttgaaatgtcctaccctaactgaggtagaattatttgcaatttattttgatgaaaaaattactaccataattactactgtaatttttttgaataattactactgtataaattcttagcgatgtaagagccctttggattcttctaggccaattacttcttttcacaagtgacagaatggaatccacagtaggtagatttaggtattttagcccagttttttttttttaatattgtcgtagggttttccaaaggtacctaattccctttttctccccaccattctgggaaagtatcattagcaactatacataaaaatgtaactttgctttaaaataactaatcattatatctaaatttctatgttaaatttcttcaaatttctcttagctattgtttcaaaatgcacacattcgtagataaaattccactgcagggaaaagtattcacaagtaaacatcatcagtaaagaattaaatttcttgtgttagctttttttcaatcgtattgaatcttcaatgtttaaaaactagtttgaaatgttcatcaaatccactgaactgctgaattttcacattttttataatttgcattgatttatggatggttctacttgctagagactctgggtaagcacaatgaattttaaggatgcttctaacgtttagagattcaccatcagaacatcatgtaaggtacaaacccacatatataaaccttcatggcttgtaatgaaaccttgtcccatgacttgtctgagagaacagttatttcacttttgatgagaagaaaaatttgcaagttcaaatgcttctggggttttctggactccctctgggactttctgtgctctctagcgctctaggctctctcagccacatcttaaatactcagatttccccagagcaagattcacaagacaattttttttttggtcaacttaattgttatgtgatgtgatttagtttctctgtccagagacttcgaattccttaggaagttttttaccttacactttacccaggagaagtctttcaatatgtacattgattgaaaaagaggaaaattctatatgtggttcattattgttctttaaaccaatataagagaagggaacatagcttaaacatgttattaacatctaaggtacaaaaatgtctattgaaaatgctattaaacaaatttaaagatcagggccttcagaatgttttaatttgaaacaattctttttcttaaagacttttacaaccaggcatctattttagctgctttatctgcagcctggtccagagaggtaaactggatttaatgggaattttagttgttttgtttttttctttctacaacctgttggtttcatctgcgctaaactcagctcctacttattgttgaggggaattgagctattgaagagtggcagcacttgctcctacatgggtcagtggtgtgcttccagtgtttctgtgctgcacaacagattatgagcgtcactaataaccaagctcttgattcaattcaaaggcttcctgtcgtttatccagcagagaagtacaactaaagctggaagtgattggaaattgtctagtttttgtcatttaaaagaagaaaggaattataagaaaatagtaaagtgtccagctttatctttaaaaatttgtatatgccaatgcctgtattttatgaaattcaatttctttagtattatacatatgcatatataggtaatgatctaacttagcatgtgtcttttaacacattgtttagctacagtttttgacaatatcagtttccaccttctgtttcagaagctccttcctttctggttcctaagaaacatttgcctttcttaaaatctgtgtgtttcagtgtattttctatacaatccacactagttgtaagacatgctttgcaataaaagagtgggtttccaaagtcagacaagtttaggaaacatttcatactacattccacctctcaaagatttgcatattagtatactaaaaccttggagaggtcctacagtgacattgtctatttatcttattatttaatccagtatcctagataatgttcctctttttttatgcagtacaacctgttgcgtattattgcatggagcttcaggaatcgcattttgggaagacagcatagtgttgtatcgtaactttaatataattcagtggttctcaaaatgtggagtctgggccatcaatacctgagaacttattagaaatgtaaattctcagccctcctcccctgaccacagaccttgaatcagaaactcattaggtaggtagggttctggcaatctgtgtttataatcaaactccagatgtttctgacatgtgctaatttcactggtctaattccactagcttcactttattcatctaattttttgattgagtggaataagtgggtgacagaaaagtaaactttaaaactgggtagttgtactacttaggatgtaagactgccttaattgtcaagggttgctgccatgactaaaattaaattaggcaaaacatggaatatattggctcttataatgaaactgctggaacaacagtcatgaaacagcaacccaggcatcagagacttgaatgttatcaatcccttctctacttctcatttttcctttacccctgcgtaacagcttcgtctcagtgggaaggaggttctatgactggtccatcttggtcaggtgctcaccctagaccaatctctgtgctggggctgtgtgattaaaatccagaaatgaagaggaatgttgtggaatagaagagagagaaacacagatgtgaccactgaggaaataacagtttgcattttctaaaattattttttgctttaggagatcgtcccttctaggctgttagaaaaatgaaccactcatatttggacaaaaaatttgttttatgaaatttgccttcaactgaagaaaaaaggtaatgtcaaaggagcaaggaatagggtaggcttaataccaccagttccctttttggagtcaattacctctagggtttctatagtttacgcttcaaggagagctacggttaaatacctacatttgctagcagaacttttttttttaattttaacttttttgtaatgccatgttgtttattaggctggaaacatttttcaccatttatgattacttataatgaatgagacagacactatatatgcatagttgcatacatgcaactccaatagctaacctggttaaaaataaaaagtgaaaaatgaatttttgttaacgtatctcattttgacaacttacattatacaatactcttttgcatgaattagcactttaaagcagatatcttctagacaatctcagaaaaatattttggatagattggcaggaaacacttaaacatttagcatttctaaatctcaaaatctttggaaaatttccaattataatataaaattaggatggactacagtatggtatggaaacatctcagaaatttcaatagtttaaagcaacgaagatgtagttcttgtacattctgtgtccacaaaagctgtgcagaaaacctgctcattgtgtctctgagagacatagtgccagcacaaatttaaaaggaattttagtacttggtaaaaagctacaagaagagttttattttttttaattaatgaaacatttattaatccaagcattggggttagaaatacacaatctttctcacaacaaatcctcattttaacatgtgaaataggtatataaacaagttattttaaggcaaacacattgagaagattgcaaaatgccctcaaggaaccactaattttgctttaggtgaaatcctattatctatagacttttctcttcttcatggttgtgggagttggggagaactatatagatattaagcaggtactaaacatttcatacacgtatgtcctcttggtgatgcacatttacccctcctctcccatttcaaataggaaaataaaaggtaatatgtttttaaatcattaccgaatattgacagccataacaattttcaacagaattttttttttttttgagacagagtctccctctgtcacccaggctggagtgcaatggcgcgatctcggggctcactgcaccctccgcctcccgggttcaagcaattctcttgcctcagcctcccgagtagctgggactacaggcactcaccaacatgcccagctagtttttgtatttttagtagagatgggatttcaccattttggcaggatggtctctatctcttgacctcatgatccacccaccttggcctcccaaagtgctgggattacaggcgttccaacagaatttttttgtggccctgtagaaaaggaatatgttgaaaagttttcttcaacagaattttcaaaaaaaacttttcaacatattccttttctaacagggccacacttaattgagcacatgtgtttcagataaattacaggcattattgccaattctcacaaaaagtattatataatacctcctatctttaatataggaaactgaagctctgaaaggtctaaaatatatgtagtaggctgtaatctccatgtagactaatgtttattatgtgtgtagtagatgtacataataaacaataggcaatttatgtatatagtagtctgtaaatttcatgagggcaggaactgtgattgtcattcattgagtcctcagcacctaataaggtgcctggcgcacagtaggttatcaaaaatatagattgaatgaatggattaaataatgaatggatagatgtgagggaactggaattagatcaaactctgcatgactctaaaacctgaacttaatgcagctttgtgctaccttcaaaggcttcctgtcatctgttaaagaatgtctgaaaaatgtgtcaatgcaagccttccaccaccttgttccagtctttccagtattgtcttctactacatcttgtgatatcctctttttctttctttttttgagacagactctcactgtgttctccaggctggtctcaaacacctgggctcaaggtatcttcccgcctcacccttcccagtagctggaattacaggtgtgcaccactgtgcccagctatgatgtacattttgaccaaggccaggatattcgagtctgttaaactttgccgcgcaaatttctgtctcttaagttgaacttcattcacatctaaaatgtgctctcttgttctcatctactacttgtatttctccactgggcctaatactgccacctaggaagttatttggaaatatgtagggcaattttgtatcttaagtgaataagattcatataaagaggagtccagggattctaaatatcttgcaatgtatggatggggccatcctgcataataaagaattatgtgaagaattatgttctttttgtttgtttgtttttcaagatggggtcttgctctgttgcccaggctggagtgcactggtgcgatcttggctcagtgcaagctccgtctcccaggttcaagcaaaggaattatgttcttatacccaaaagccaataacctaaaaaactttgataaacagtatgtgtctaactcagtccagagtcagcacaatgcagtcatgattagcattagagccaaccgatgcttaatcccagctatgtcacttactaattatactattttgagtcatttagatgcatataacttcagttttctcatctgtaaaatgtgtttaataatgtatttcagcaatgaggtgggaagtagagatgagaaataaaaaactctagcacatagttggtttttaaaataagagctattcttaacacacccttgaaaccaacatcaagccccaacctccttgaaaccatgctattccagctgagaatatcctttccttcttctcaaccactgtgttttagtcaggggtcttttagttgcaagaaaaaggaactagttcaagttgtctcagggagaaaaaagaaagtttattggcaaggtactgcatcagttaggattctttgtgttgtaagtgacaaagtaaaactgacttaatagagagatgtattacttcacataatttttagaaaactataaaatccacaatgacaattcatgtatatagtaaatacaagctctgtgagtgcagtggttctgtttgtcttatttatagttggttttgttctcacattccatatggtaaagtcctggcaaatccagactttcctctcatagtattaacaaagcctgctacagtatcggatcacttatctatacaccaactatccctggggaagagaatgagcgcttctagcagagcccaaggaagaaataacttttctctctcagaaacttttatctcatgggctttaggaaaaattacagatccatttctaaaccaaccgcagaggttggggtaggaagtgaaattatttgaaaaagcaaacaaacaaaaatttgcttaagctcattagaacccagccattaatttgagaggtaaatcgaccctctctcctccaaataactgacaatggaagaggagtggcttcttaaaagataggagaattgttagcaagcatgggaaagaggtggaatcatgtggtacaaaacatgaccgctatagtggtaatagagatcatggcttagatttttcccaagaaaataaaataagtctagagaataagtaggcaggcaactgcaaaaaattaattgggtaatgccctaacatgtaccaagccctactttcagctctgaggcttcaactatgaataaaatgactatcttccccaccatatgagagttagtcttctggtagataagatagtcaaacctaaaggtgattcagacttcaaagcttccttcctatgaacagtttacttgtttgcaggtcagtttacttagaatttcaaagagaatacaaccaaccacatgtaatcatgtgtaaatggtgggcaaacctgctatacttttgtttttaccatgtaacatttttttttgcaattatgatatagtgtagtggcttttttttaattttgttttttgttttgcaaatgaaaattttcaaatgggtggtaaagtagagacttagtagtactgaaaaataatgtcagtagagagttggatacctaatcgatgtcttgatcaaagcttcaggaagcttgggaaattagcagcctccatttaatagaagggtagatgagtggtgatcttagacataagcagctctgtgaaagcaaggagggtgaagatattgagaggtttgcttgccatatttgaagtcttatattagtcattattttcaacaactcttaccacgtagccaaacaagggagttcatattaaatattttggatgtttatgttttatttcttcaagtaggttgtattattcttgcattttttcaccttatcttgtgcacttagttagcacactggtgatacctagtgtacttagtagtcactagtcattgggttaattaactgaaataaaagggtaggggtaaatttttgaaacagatataataattatcattaactcccaaactcttattttgcccctctggatccctggaaaagaagttaaatcataagattgtgcagattctaaccctactgggggcacttagaaggaaataatttatcaagtgataaggagcagtaataaaaattcattctcaaataaattattgtgataagcagtgaggtttttttagttattaaagaacttgcttgcaggaagctgaaaattcacactgtggtccgggtcgcaactagctcttcattatgacacaaatgatctcatgaagaaacctattggtgataaaacacagtgtggatagcactcgccttagaagcaaaggtgagtagcttctcaaaagataggtaggaaaattcctattgaagaagctattggctgggcgcagtggctcacgcctgtaatcctagcactttgggggccgaggcgggtgcatcacaaggtcaggagatcgagaccatcctggctaacatggtgaaaccccgtctctactaaaaaataaaaataaaaaatagccgggcgtggtgacgggcgcctgtagtcccagctactcggaaggctgaggcaggagaatggcgtgaacccgggaggcggagtttgcagtgagccgagatcacgccactgcactccagcctgggcgacagagtgagactccatctcaaaaaaaaaaaaaaaaaaaaaaaagccattggcagagcttcttaaacaggaacccatagatgtctttgtaaattctgtgaaatgccttcatccacacccccagcaacgggatgcaagtttctacatgtgtgacaaatcttatctttctggggaaagaattcacaactttcccccaattttaaaggtagctgaacctagatgaaagatgtagacccatgattctatagttattgtagggaaaatatgtgagcaataaaaacaaagcctttggcatgccatggtaagattggccctatagtactttgctgttacccattagacaatgtgtgcctcgtggagttttggtgacagatgtcttgcaatgcaaatctgaagtattatgttcctgaatttagccaatgggaactctgtttttgtagtcaatcaagtgtggctatacttgtgtcacacttgagttcattcctgtttgtatctcatatccaatcagtcagagaattctgttcaaccactgctctttctttccaaggctatctctattgtccaagccactgtcatatcttgccaggattattgcaatagtcttttaattggtctccctgcttctgcctctgcacatttccatctactcccaacacagcagttgcagagctcctgtcaagctaaagtcaaattatatatttcctgtgttcaatactttctaatgccttccagttttattcagaataaaagcccaggtatgttctcgacttataaggccctacatgatgtggctacctgtcatccatctgaactcatcttctgctattctctcactcacttgtttccagactcatttgtttctctattgtcccataaatgtatcaagctggctcctgtttcagagagcttgctttggtcttccctcttcctggaatgtgtttcaactagctctcctcacaatttgctctctcactttagatttttatttaaaagtgccctttactggcctggctaccctaatgaaaatctcaatctcacctgccttagtgacttcacttttctcatctgaagtataacacatgtatttactttatttattgtcttccccactagaatttaagttccacaaaggccaggatttttgtcggttgtatgtgctgctataaaccccgagagtcagacagcacctgatacagtgtaggcaagaaacacttgcaggacatgtgggaactgcatagctgggtaccctatatgtcacccagctctcaagtgctgtgcctcggaagaaagaggggcatcccatcctccttattagttctagattttttttttttttgagatggagtctcgctctgtcccccaggctggagtgcagtggcacgatctcggctcactgcaagctccacctcccaggttcatgccattctcctgcctcagcctcctgagtagctgggactacaggcgccagccaccgtgccaggctaagttttttttttttttttttagtagagatggggtttcaccgtgttagccaggatggtcttgatctcctgaccttgtgatgcgcccgcctgagcctcccagactgctgggattacaggcgtgagccaccgtgcctggcctagttctagatcttgatctcaaaacgtttatgctctatttgaaataaaatatttgcattttaattgagagacagaagtaagtaattaaatatatatatatatagttttggcatcagatggatctacactcaacccctggcttggctatttatacatttgtaaaatattgatgataatatgtaccttccatgattcttgtgaggatgcaaacacttggcatatatcaagtttaataaatggtggacttctcactgcagtgataaaagataagatgtaaggcaaagattgacagttgggacaccaccattttcttatgactagctaaaagggtctacaccatgaagtcaaccgtaaggtaatacttcattttttttttttttgccccagatagtaacactctgctattgtttagtgattttagtgattttatactaatttaaatgcttttttgtctcgtcacacattcattttttaaagtgatttagagctgatttctatagcaggctttaattgtcattttataattcaggaagcatgacctttgactctggcaattttgtttatgatgtcaaataatgaactacagtaataagattctcttgtggtcaaattattccattctcattaaattatataaacatatattttctgaagagctataatcaggtgtactattcttgcattgatttgatcagcatattgacatcttttacctgaaaagtctcctttgggaatatttgatgagtatttattggaattttcttcaatagatggtgaaagtacaagattcagcaaatttcattcccctattttaggttaacaaagacaaaggacgtgtgattatttgggactttaatttctttaattaaaatatgattgtttgcattatttaagtaactttgttaggtaattaaattaataatagtcatcaagcatatattaatcttattttcgtttgcaagaaaccgttaatggcccagggcagggatattccaactctgggaaaactatgaactagatggagagcgctttgtgctcctaatgatgagattatcttcttctactatcacctagggacaagcatctggaaattaggtaagctactcctggaaaaccctcatcccctctattaaatttattttttctcttgttagtgtaggtttttctccttgtgtcctaagtcccaaagcctccttgctggagaaggtggttctaatgaaagaaaggaggcacccaatattggaaagactggaaatttggtgtttcacttctcgtcagggtatttttatttaaaagtaggtctcagaacagattgatggtcaaataaggtaataaatcaggaacagtgcaaatttagcaggtaccgggccagctttgtatctcaactcactcaaggatttcaagcacctatctgaaaaactagttacacatattctatcatcctcctcactttgtagaacatctggtggcttaattaggcatgtctgtttaatatagtctcaagcatatttttgttattcattggtctctttattatacataaattcctcatatctatgtaccttcccaaaggatcagccatagaattttgtagagagtgaacacatgctcaatacctgctcaataaatgtttggagaattaaattgaataggtattgattgccctcaactgcccttactccctaggctgcagattgagaccaattagctacagttcttcaatgcaattgtgtaatggatataactaatattggaggtattcagttgatcacacaattatttactcatttacacatccattcatttaactaaatatttgttacgttcctaccacatataagtaaggtgacggaaatatatagacacattagattgattatctggtcacaaggcacatatggtagtaatgactccacataaagtagtgactggtaagtttggccaaatattaactttcaagtcattagaaaatagtctattgtctaaatatgtagaaacttagtatgttatatcatttgtcccaaggaaataatgtcattatcgtgtgaaatgggaactataaaattccccataaaacaacttcctttcctcaaattcgtctatgttaaagtacttgattttatttgtttattcattcagcaggaaagcaagtatcaagcaacttattatgttctgggtattattttaagtattgagtgtacaaagatagagaagaaaaaagggaaaaaagatacttaaaatgattaagtgtttgggaagtacagcttactcacatgcatgcaaataactataaaattcacaaaaatgagagtactttgccttcttttgatgtggatattctgctttatttctctttctttaagataaatagaaaaataaaatattagctaagattaaactttagaggttttccttcctcctatacatatgaaggacatcgtatgctatttatgaacaaattgtgggataatgatttgagagtgacatctatgatagcatcaagggtagaagataatttttattcaacttccattgtctgtgtccattcaaacaggaatctcatttattgtgactgagtaggaaaagaaatttagtgaattgaatataattatcacataaatagtttggctggatttagttcatttgaatggtcaatgcagcataaatatttccactattcatatttacaggtttggaaactgttcacgttcctatgtttcatttgttgacagaagtatattaaacatgtcattaggttaaaggggtataacatggaaagtaatatttctttagaccttatttttatttttcatggttttttttccatgcaaaaaagacagaaattgtcatttcacaatatttaacttttgactctttggagtcctaatgatttcagctctgttaaaccaacatattatttatatcgcaatttctttttcatggcatttaccaaatgaaggaaattactccttttattagcatatctaatcatttgtttgcaatgacctgatttttatctcatctatgttgttgcaacatagcatataataaccaccaagactgaatttttttcattgcagggttgaaccctcctaatttgtcaaatctgttatttgaaccagttgaattgctagcttttatctcaattttttgactgctgcttaagaggattagaggccttggtcagctacaccagggtggctcacagtaacaggcgccattgcagctcagatccaaaaatcaatgaagtgcggctcattgagtctgattgactaagcctcaattgccctgtggaaaaaacctagtgtcagtcttctctagttatgcaaaccaagtcagacagaaaccagcagctatgttcttccttttaaatccaaatattaggaaggtaatagaaagggtgaaaggtagcaacaacaacaaaactatgaagaaaagacaaagtgaagaactggcctttgtgcccaaaaacatactgtgatttatcactttattaagtctccaagttctctgatgaaatagttttttacttttaaaaatcgtccaaaattgctaattatcatcatctcattttttcttctagatttattaagtaaatttacaatgcaaattatcaaatgtaagttttctgtttgaaatgtatatatatttttctttccagtgaagtcataaaagaagaacaagtatatgacctctctcatttttcattctatagaaaatcctatgaaatagatgcatttattctgataggacaacaagtttttccctctgctttatgtgacaacatgttcttccctcagctttatacaacaacatgttaacaaggtctttcctctgcttacattgtaactgagtgaagcaattaaggatcctcactctcatatattttagaggggggaataattatcttgttccaatttgaaggtgttactacaaggaaaaagtcgccaattccatttaaaagtgaaggctttccccccaccgtggaagcttattatttaaaaaaaaaaaagggtctcagtaactggatctcgtgtttaaatagttctgtcagaactttcacaactctaggttaccataatcactcaacaagctgatgagccctttaccaaaagttgattcctttaattgtgaacaattagacaacattttctgggaataaaagagtctccggagagcaacagaattttatatcacagaatcacagtgttctagagctgtgagttttcaaactatgttttgcaattgtctaattacgaagatcagaacacaaaaacccccaaaattaagggatttgactcaggtcataaacaattgaaatttttaaaataaagagtgagagacttgatatgaaggattttaacaggatttaaaggggtaggaaatttaaatcacaagacattttcatgtgatttgaaattttattaggatcatcttgtcaacaattctaatttagaggctgtaattcattttaaacaacttaaaattcaatttaaaacaattctatttaaaatctaagcatatttttggggaggaacgaaacaccccagataaagttgaaagcaaatggcaaccaaggcagaaaaatggatttaataaatagtacattatttctagtgatagtagtttgttttatctatctctctagaacctaccctttaatgtatgggaccttgtcatgtggtgtgtaaataggagcccacaacatgttctattaccaaaaaagcaaggctaaaactgaagctgttttgaaagagatggtcattatgttaaaacaggagaaaacattatcctgaataagtttttatagtaatgaaattttctgaaacttcaattatttgctttttgtcgctatgaaatcattttgcagtataataacttagtaatgagtgaaatttggaataagtcaacattctcattaaaacaaagtcatctgatattactgagaaccataaaacagctattgaaacctgaagcttcagagaaggaaatctttattgcaataaagaaatcagcaacattgtttataagcatcatttccatggcaaaagattagttcattcaataagaatcttgtaacatggtgccagcacgggtgcaataaactttatggaatggctcataaaattagactaattaaagataatctaatttggacaattttatcttctggaaaagaaatgtgatgtcatcctccgggaagaaacaatgtttagtctctggggatgtgaaaaaaaaaaaaaaaaaccctcacaagatatttgcaataataagaattagggttgatccaaagacagtcttagatctacccattgcctctcaaaagatccaccacatagactgttaagccccataattatctcccctatttgtgacaagcgtgagctaatcagtctctgagggagttttccagcagatactgaggagagtgtgtgagcttcacagtgctcatcaagctattttgtactcagaatggcaaagagctgaccaaagttcattatcctcatctaaatcagaattaattcaaattaagaaaaatagactttttaaaacgccaagtgcttatgatttagaacaaagagtcttcactatttttataacagcaacataggttctagctgcctataatcccatattaaaagattagaaaaaacatctgaagaaatcagagagtgtctaattgaggttcttgcctttaatcctgcgagcagactccctcttggatatcaagatctgtcagggccgagtcaggggaattctgtaaggaaaaagcaaccacgaggaatataacatattctttcctacttaagaaataaaaagagaaaaacacagttggtgatatcaaaacataagccaacacaaaattaggggaaaccccaaaatggatttgtaaatataagctagcaaaagtggagaaataagccaaaccttgcttgtttataatgtttaaaccattgtgcaatacagggtacacaaatagacaaaaaaaaaaaatatgaaagagcaagtaataaggagtaacaataaagatagaatccagactagcaaggaattagtaaactatttaataaatgtattttacctgtgtattgattcctaaaatattaattatgtgattgtctttttaattccatacactcatcttgccagagaattatatgttagtgagtacttttgtatcaaccatggaacgttacagtgaaacaaagtttttctgtattgctattttataattgtgtataatacagtttagaagcttcactggttgaaaattagtatttcatgcttatttactaaagaactgaaatattaggctatagttcataaacagtaagttaaattagtgtgataaagaatgaaagagtttaagaaacacaaaatcttttataccataattttaaaaaaaagtaatcaagaaaaaaagaggaaaaagtggcacactaaaatcaagatatactttacagtaatatcatgttttaatcacaaagcaggatatttgctgccctaattgcttagaaattgatacaaaatgtaaattaggcaaagctatctaataaaaattatagagatgcatatgtgcatagtaaacatatttttcttcagcttactatgcattaatactttaaaagggttaatttggtgcataataggaaagttttcttatattttcatcataaactcacatatagaataattattcaaaatattttaataggaaatttaatattttattaacaatcttttagtaaaagatgcctcttttgcagtaaactggattttgagggactgccaaagtcatcaagaatcattccataatacagaaacacttggaactgagcatagatatggaaaaaaataaatcaatctaacaaatttttctttttaattgcaaatgaaaatttatggaacaatatcttttgatctgtacatgctatctcacgaaagattccacacctcttcagaaaacaccacaccatgatgtacatgcatttaagcagtatttgctcagatttgtgtgaatggttcaaataataaccttcaaagcataaaatttttggaaaaaaagtaattttgataagtattttaatgaaccaattaactaattaaatgaaccactcttataaagctatcgattatttaagtctcaattttgttctaattttttaaaatgtgatcattatattaagtactgaagattataaaattagtactaatgacagtatatgtactatatgactaatatatagtcatgtgaatggaagaattaagaaactcacagatagtgacaaaattcaatatgagcagtttatattaaaaagggcagagagcgaaataagtgggggttatagaacccaaacctaaattccctagtttctccatgaaatcctaagttgtcatcctatgactttatggaactggccacttcatgagcgagccagtatatctgaaccctttaataaccaaatagcaggtgagaggtgaaactcacccagttatttgatttatagttaaaataacacgctcttttacgaatgtaattttagcccgacttcttagatttgatctaacaaaggaaaatttatgagtcatttacatttttacaagataccaaattatttcctatgctattgcattgaaagacgggagcttaatatttaactttagtatattgtaatttaatcattaaacactatgatgattactgtaagttaagttctgtactgtgaatcatgaagaaaaatacggacaatcagaaattacttaaaattcataagcaatgttaaaaaacaaaagaggcatatattatcttaggacaacctaggcattgctctggtgatgacagcataggaaatatctgaggcttgcttgaggtctgtctcattaggagtggaattgccatagtgtgttctagaagtccaaacctccacctgactagcatagaggaaggaaggtctacttatgcatacctaaccttctctgcaaaatacagtcacacaagaaagttttaaaaatcctgatgcctaagcagaacgccaaacaataaataaataaattaataaataataaattaattgattttttaaaaatccaggcatcaatgatcattttaaagttctccaggtgattccaatgtgcacccaagtttgcaagctattgatctataccaatccgcccctcttcctggctacctagaaaagtcctaagtggtttcttggaattgagctttctaatgaactagaagcagttagggtaattcagtggttctcaaattttttgctttccaatcctttttcatgcttaaagattatcgaggaccttgaagaacttttgttattgtgggttatttctactgacatttactctagtagaaattaaaactaagaaatttaaaaatattaactaattatttgacaataaaaacaatgaaaccactacatattaatggttttataaaaataactattttataaaacaaaagtatcagtgagagaagtggtaaggttttaaagttttacaaatctccttaatgtctggttcagtagaaggcagcttggttttcatatccactttgcactcaatccgttgcaataacacatgtctggaaagattcgctatgcacttataagagaaagaaaatgaaaataacaacttagtattattatacaaatagttttgacttcacacacccctctcgatgagcttgatatcttgagaactgctagtatgatcacaataaccttcacagtgcagacaaattcacatgtaacaaacctgttgtccccaaaaggaaccacttaggatatataaaagagacactgttgttaccatttgcttggcgacgcatcaggttatggctgtacagatgctatttcaaataccgagttaatttagaaagaaaattccacatttcaaactttattaaaccaataagcacttgaaaaatatgattcctatagtgaatgatttctgcctggctaaaagatccaatccttgcatccccaaattatccaatctagttgatgaaacacggcatacataaataaaaatttacaaaggaacattttatgaggttaaaattgacacacaaatatccgagtaagttttaaaaaacaacaaaaatcctagattattcaaatatgtttaaatgttcttgttttactctctttttcatttaagtggttatcatcataggtagataattttcctttataaaatgataggacagaaggaaatgacacctttgtgctaggtagctattttgacttgccactaaggctacagacaaattcttctataaatagttcatatttgttcctaagtactttctattgttgtctttgctatggtttgaatgtgtttccccaaagttcacgtgttggaaacttgatccctgatgcagtggtgttggaaggtggagcctgatggaaggtgtttggatcgtggggctcttccctcataaatgcattaatgctgttattgctggagtgagtttcttataaaaaggatgagttcagccccttcttactccctctcaccccctctttgcccttctgccacattagggcatagcaagaaggcctttgccaggtgctatcccctcaatcttggacttcccagcctcccgaactgtgagccaataaatttctattcattataaattatccagtctgtagcattttgttattgcaatataaaacagaataagatattgttgttgctgctgttgtaattgttatttttctcacttttggttaaaggcagatgaccttcaaaataaaataacattcaattggatttatttcctctgatctaaaaaaagggtgttttcttgttagcttatattttctttgtcctttgttagctcatctgtacattgcatatgctatattatgtatgcaacaggaatgcatatacattcaatgttattctttccattttgtaccaccattcacacttattatggtcacttttaattctaattctattctccaagatatcagctatttcttccacttgatgtcatcagcagacttaataagcatacttgatattctatcatcctggtcattggaaaaatgttaaatagcactgaactgggaactgacccctgcagaacacttcttgttacattttccctttaattcattcccaaattgatacttattatctgtatctttagatgtgtaccaggtaagattggccagtattcctttggtacataacatatttctaataattaagaaatactctaattggaaatctatatacaactcttatagaattgagtgttactcataaaggaaagagttatgtatatgcataaataggctaaaattggcccttaataagtgtaatatgaagtcatgaagcaaagaaaaacccatactgtattgaaatgtccattacttgcttcaaccttgactaaaatacccatatgacccatgggaaattagaaagaaaaatagcattttataaatcgttaaactaaagttttcactgtaagtatcctattggtaaattatgtctaaataactatctttacttctctttctaattggaacatcctatctagtgaagcctggcatctttctctccctccaacctacctctaacattacctcattcaaatggacatggtaaacgcacacacacacacacgcacacacatctttttattagcaaataatagtggagtattgctgattgtgttaatttttatgcttatattccctaatatatgtatgtatatatatgtgcacatacatatttaaattatttccttgattaatcaaacattactaggattccataatatgaacgtattaatcctacttcacaaatagaacaaagtaagaggataataaagcaaaacagaagtttttcaaaacttcacaaatttaagataatttgatattgttagtgaataagacaagcacctaataaagatgtattaaatgtccaatatgtacttaatacaaaactatatgattctaatattataaaataactaacttcaaataactcttcaagagctaatagcttatttattaaaataatattaaaatggataatactggccgggcacggtggctcaagcctgtaatcccagcactttgggaggctgaggcaggcagatcacaaggtcaggagatcgaggtcatcctggctaacaaggtgaaaccccgtctctactaaaaatacaaaaaagtagccaggcgtagtggtgggcgcctgtagtcccagctacttgggaggctgagggaggagaatgacgtgaacttgggaggaggagcttgcagtgagccgagatcgcgccattgcactccagcctgggcgacagagcgagactctgtctcaaaaaaaaaagaaaaaaaaaaagataatactgacaaaacaacacaaggcattgttactgctgaaatgtaccgtgcagaatagatctcacaggattttagagatgattagacgatattagcttgatggtaaaaagtctttgtgaaagaaacagcttctgaatgagaacagtctaggtggtggaaaagaatgtctaaaagaaaggagagagtaatgtgagtgacatacacatacataaaccatgaatacataaaataacgtatcctaacacatatgctacaggtgcatgccttttataaatgttggtgaacctgcgttatattccagaattctgtaagtggtagcttttacagatgagttctgggaacataaaccagacctaagagagtatatcgatttttattctaggtaacaaactaatccccaaatttagcagattaaaatgacagttattatctcacagttttagtgttatccaaagagacttagctgtgtgattttgactccaggttctcagaaagctgcagtccagttattggctggggctgtagtcattcaagactcaactgaacaaggatctgctcttggcaagtcttaaaagattctctttcaagtacattcaaatgggtctttacacaagactacttaggggaaagcagctggcttctagagcaagagaatcaagacagagtgtgggcaatcaagacagtgagagcactcaggacagagccaggtctttttacaacttgatctaagaagtaacatcacatagcttcttccacatctgatcttggaactgagtcattaagtctataccacacccaaggaaaagggattatacaaaatgcagaaggcagggaccagtgaagaccatctcagaggctgcctacctcagaagacaagatggatattgggtggaggaaagaaaaagaaatctctctttctctgggcctcattccattggggctaaaagtcagaccatctcgaggtcattgagaattcttccttatgttcaaatatgaactacagaacagtcaggaagttgggaattagaaaagaataaaatttaggatatgatggcttccaaaatgtaatttatctctctttcttcatgctattttatttcttcttcttgttattgtttagtccaaagatataaaatagttgctgcttccttcttcattttctaatgagacaatggaaggtactgcttatcaatcatggtactcttgcatggagcccacatgtgacctcaaaatcttctctgatatagtaacccagatgtttacaacagactgaccaaggatgagaggtaattttccctaccagttacagtctttagaagaaaactgcttcagctttcatatgtatgaaaagtgttctctgtagagagtggagaaaaggtgacctttttaataaatgatgttgggtcaattggatatttatatagaagaaaatacaactgggcttctatctcacaccatatataaaagtgaattctaggcaaataatagatctagatataaaagggatacctacaaaggaaaatatttataaatatttacttactatgaaaagtcaggctacatcggtaaatttataaatttaaatttaaaaattattaaatttataaacttccacttatcatgaaaaggcaagctgcatgggtaaaaatatatgcaacacatataactgatgaagagtttatatctgcaatatataaaagacacctacaaatcaataagaaagagagaccccacctcccagtgaaaataagggcaagaagtctgaacaggagcctcacaaaagaagatatctcagaggacagtaaacctaccaaaaatatttctatagctatacatccactggaatagctaagatgactgacaatttctagtgttagtaaagatgtggataatgtcaattttccatataatatgaatgttggtacaaccactttagaaaaattatctatctatgtgtatatatatatgtgtgtgtgtgtgtgtgtgtgtgtatatatatatatataaattaagtagccacacatcctcttacccaggaatttcattccaagacatgtaactatagatgagattaataatatatttataaaatactattcaacaataaaagtggaagggaaaaatctgagggtacatgcaacaatttggcttaatttcacaatcataaatcataaaggcaaagaagccaaatataaatgaatgtactactatatctatctatctatctatctatctatctatctatctatctatctatctatctatctgtctatctatgtatctatatctacctacctgctgcatgattctatttatataaagcaacatatgcaaaagtaatctatggtgttagaggtcagtattataattaattttgaagaagaaggacaaaatagatgttgttacaaggagtatgagcccccaaaaaattttagcgtgctggtaatctgtttcttgacctggatggtagtcaccttgatgttttcattttgtgataatttattggctgatttgtggctttctttgtttataagttacactccactaaaatgggtttttaaaagactcagctttattttagttgaatcagaggataataaggaaatgattctctagtttcttctacaaaaaagacacatgcacagttagtttggaaactaactctacacttcatcaatcatgaagtcagtgtaaccatggggtgcagagttataaggaagctaagagagtaaagtatagaagtttagtgaatacaaattccttgaaacaaatacataggatgtattcagaggcacagccatcttctggcagcttatttgattcaggggaggaatattcttgtaacgtttcctaattggaattttgacaaaactttcaagttggttagattcaagtcgtattttacatacatttaactttgttctgcctgatgtcttgatgggcaagttcagccaccttacaaagtttgagaacagataagaataacaatttagatggggttaaggtaatatttcttattatttattatcaaatcagcagcaagcagtgcgaaaggcatatttgtgatcaagaatccatgtcggcatgagagggctcagctattcagggtctcctttgttccttgtggatatggttggaagttagtggtcacagcagccacacagcagaaatcaccaggtcagagaagcccaggattaggtatgggttcactgtgtttctatatcatctcaatctgggaacggaaaggagaaggaaatgtcagcactcaggggtctactccgttgccataaacaaaatatcttgctacaacaatggttataaaatgtagttccctggggatttatgccttactatgccattaagcctgctcaaaattcagtgcagtagccctggatatcacctaccaaaatggtttgatttcatttcttcattcacttgttcctttattcttgaaatatatttgtaaatcccaggtatatatcaagtactacagtaaccccagcaatttgaagttgagtaattcttaatccctactctccaaaaattcttaaaacatatggtggtatttcaaaatatttaccaaaaggttcctgaacttagagtgagtattcatcttttagctaatttcacattgtaaagttataggcaaagtaacttgaaaaatgtagatcttataaacattttaaactgctctcagcaaagatctgaggaatttttggaaatgacataatttccattaaataagtaatgttctaacttcctcctttgattcaaagaccaatgtcccagtaactttaacagcatccgaatttgagatagttacccttttaatccctgaaggacctaacacatgaaaaatctcttagagttactctttccatctcaattaatttgaagtctagtaagtgagcttaattatatgcatgaagaaagcagcacttaaaccctaagattacgaatctgaaaacagaaagggtactaagagataatccttccttatgaccctagagacatttgaccccaaatgaacagctgggctcaaacaacaaagtcgcacagcctttacatttatatccatgctaaaacagcacacatctctataaaatcaactttaaatttcagttttcattgtaattatcaagtttttcccccaatgactttaatgatttttttcatagataaatgtacattttcaaatctcttgaaacaaggtccccaggtgtcagttgcagtcagaactaataatggtatgggcatcttctttgttgcttcatttgaacaatgagttggcctttttttgtgagaattaggcttttggatcctgagatctatatatagaaatagatattttctgatccagtttggcttctggctagtcccaaattttagttaaccaacatttgttgaatgcttactatgagccaggctgtgctagatattggtaatttaaaagagaataagtttctaacttcctagagaaccagtcagaaaattaatgtttgagtgagaaattaaggaaccagagctgaggctgttaatacaaagagacaattttgagaggtaatgagggagaggagtttcaagagctatatttgaaggtaaagtgacagaatttgggaaacttatatattcaaaaaactaaacatgataaatgtatacaattttatttgccaattaaaagaagtacactaaaatatgggaaaaataagagaatagaattaaaactgatatcttgggaaaattccgaaagccatgttccttaataaagagatttctgtagttctcccaaattaaccttaagagcacacacatttttggcttaaaaaatatttttgtagtgagaaaggaaatagcacttttttattatttagggagtagtagtgataaaagtcttttaaaggaaaagagaattcatgtgatgataaaaaggtagataaaactgtatctagacattttaagctggtgggctgtgggctatgtttcagtgtattgagtggaagtatgcattcctctcagtggccaccatattcctatgtccttctcattcatctcactcacatacttacctgcctggccactgagtcatttaaatttcacttccctccacatgattccaaattctaccattaactccctacaccttctcaggcaagcaacaagttattgtctttcaatttctccatgtgaaactggaggggtgagtgacccttctagtgccctccatttctagcataggggttgatggactgtgcatggtagcagtttttaacttcaacacttcatgaaaatcagatttcgaaatctgcttaaggacataggtataattttattattgaagtcacaatgcctttgaacttgaaatctaaagaccaggtttattttatcttcattgattgtttaactttgttatagtttgccatttaaccatgccataacacagtgtcttaatttacaaaacagaaaaaaagttccatgtctattgaaattttgagagaaataagagaatcttaaaaaattatttccaccacacagacctgattatgtgttgattattcgagagaagataactaaatgagataaaaagaaaaaacagttgttctaaccagcacatttagttttgtgttctcctcaatgcccatcaagacccttggaattctttttgctttgctcttgctctaaatctcgtgccagctatgacaactgagccagtgtgataaaaatgtttgccatctgtcttgccactttgagaaagttaccaatttgtactacaaaacagaacagcatttaaaaggtaggctctgctgtgtacaggacaaatttaataggagaatatattctttggctgatttgaaatatgataatcttctaatgtctcctgtaccaatgaagaatatgatttatccaggtggaagctaacatcattttacaaaatggcagggatgagtcatttgctatgttactgtgaaataccttagcaatgttagtgtgaattactgctcagttaacattgtttacctcctaattattaagaagtacctcgatccatcactgacaactcagtaaatgactcaagacactatgatatttgcaaataggacaacaaggtcatcgcaagtttaattagacactatgcattatgaaacagcaaatggcctacgatgagaagtaaaatttcaatttctgaatatgccttataaaatgatggaaaattgctcacacatcagtaattataataacaaatatatgtaatatcatttaagaaacttttaaaaattatcatctgtgatgagggatgagaggaattaattactcatatgattactgagaggaactaattgctcacagattacacataagtcaatgtaagttggttctagattttgaaatgaatagtcatcttctagcatttggtacagagatatctttaatatatgacatgtaaaaatgagtttgtaattctttttggaatttgtttgtgggcagataaagcaaaccatgggatcattctttgttatgtttggtttgacctgtatttgcaaatattctggagattatccaacgtttagacaaaagtacaatttcccaagtctaggaattgttccagtgtggatagtctattcctatatattttatggaaaggatgttaatgtcatttgcatcccacctgatatattggggtggtagtctctgaaaatagagacgagtagtggtttgcatgaaagatgaggtgtaagaactctgccaaggtcaagaccctgtgattagcttgcatcaatcaaaatcatcattttcagaggccatatgtttaggaccttatataatagctttccaaatggatgagttatttctcactattttccttttccattcttggaaatgtcaatgattttcttctcattctgtgaatcttggcaaatgggatgagtattgttttatataaagcatattcatatttaatattttgttttatttcagatgttatttaaaatactttattacttgattatttttatcttataaacatgacctaggtaatcagttataaaatcttaaaattctaaacaatgaacattaaaattactatctaaaaatgtgtcacatatacttctcaaagaagacatacaagtagccaataaacatataaaaaaaagctcaacatcactaatcagcagagaaatgcaaatcaaaaccgcaatgagataccattacacacgagtcagaatgtctatcattaaaagaacaaaagataacaaatgctgtcaaggctgccaagaaaggggaatgtttatacatcgttggtgggaatgtaaattagttcagccactgtggcaagctatttggagatttctcaaagaactaaaaacggaattactatttgacccagcaatcccattactgggaatatactcatagaaaacttaatcattctacaaaaaagacacatgcacttgtatgttcattaccacactatttacaatagaaaagacatggaatcaacctaggtgcccaccaataatgaattgaatcaagaaaatattgtacatgtaccccatagaatactatgcagccataaaaaggaatgaaatcatgtcctttgcagcaacatgtacagagctggagggcattatcctgagtaaattaatgcaggatcagaaaaccaaatatcacatgttctcacacataattgggagctaaacattgggtatatatggacataaataatggaacaatagacactgtggactactagaggggttggaaagggagaagagaagggctgaaatcctacctgttgggtacaatccaggtgacaggatcattcatatcccaaacctcagcatcacacaatatacttatgtaacaaacctgcacacgtacctcctgaatttaaaataaaagttgacattgtaaaacaaaaagataaatatataacttgaaatctaaacatataaaataaaaataaaaacatatcacttgagacataaagcataacaataataaaattcctgatcaactgagaaatatagttgagaaatagagttgtacagtaaaatatgtatttcaaataaatcatagaaaacatattattgatttcttcactaagtcattaccagtacaggagaacatattgaaaaaaatcagatgtagcttttgtcttatccttgagactgggacaaaagtaggggcactataacataggtttaagaagaaagcagttgttcactctcataacgcacatttatcaaatgttattaaactacaattttttcttttcttatacagaagcacttagccatttccactaagctgtctcttttaacactaaacagggcaaagcggtgtgtgtataaatgattctgataatggtaacttgcatggttctgcccttttgtgggggcctctgagagtctgagttggtcttctatcatattcctcactgttcttccagagtacttctaaatgtagtaatttatctgtattttttctgtgccaaagataagtgaaaaattattggcgaatattatttacttaaaaacattattatatttcatatgtttaaacgtttcacatttttgtactgacataatatttgtatttatttatttatttatttattgagacagagtcttgctctgttgccaggctggagtgcagtggcgcgatctcagctcactgtaaccttcgcctcccatattcaagcgattctcctgcctcagcctcccaagtagctaggactacaggcacccaccaccacgcctggctaagttttgtatttttagtagagacggggtttcaccatgttggccagaatggtctccatctcttgacttcgtgatccgcccccctcggcctcccaaagtgttgggattacaggcattaaccaccgcgcccaaccaataatcattttcaatatcaatcattttctacttacagcataaaaataaacattgaataattaatatacaccaggctaaatattttcacaacttttacaagtggtacctgaagtgaaaatagaggagcaggcatatgataggaggtaaactcagtttatttcatgtctgggcacagagaattttctactttactgattttcagacttcgccttgcattagaatcactttgggcacatgtaaaatgcaaatatctgttccttttccctaagtgtccaatttcctacatctggagtagggtccagaaacaggatctataaagtactttagaccaaaattacagaatcttgtatataggtaaatcaaagtaaaactgtctacagataccaatgtacaaagttcaatttttattacagtctgcttggaagagtaaagcatcacaatttctttgcaattttataattttcaagatgaattatgaattatcataatgccgtttatcctgtctattaccctaatcaagttgtgttatgaaagttagagttttctgatctcaacatatgttagaagatcaccactattatatattttaaaaccttgcaaaatatgtaagactagatggaatccaggagatttttaataaacttataattcgagtatagatatttgtatgcaatatgttttcccccataacatagctttggttctaataaaaagccttgtacatcaatgtaacactcctttgtggcaccagaatactttacaggttctcatttcttgctttatttcagactataaatttatgctcttaaattttcctggggtgagagaactgatgtcacatagccatgcaaatacagactttgctctttcttttcagttcacgtcaagaagagaaatgaagcagtattttaaaagagaaaaatattattttgcttcatgcttcttttctaccaattaaaacattattctcttacaggtgcaccactgtaaactcctgtcacaagaaaagtggatgtcataatgtctctactaaaagtcattatacccccattgatatcgttgtcctttggttgatatgcaaaaattcttagaattttgaataattctatccttagaatagaacagttattttacacatatttttgcacaaatctggattgatttatttaacctggccatgtcatgaccagctacttgtccaattcaattaattaattaaattgcaatagtaatatgtatcttttttctaggctatattgctaacacaattgttagtggctccatcattctccactgctccattatcctgtcctccagaacatttctatttattcttttattcattcattcattcgataattatgtattgacattctactggcaccaggcaccattgtataatctgggcactatccaaggtactgtgtttcccttgatatgtctctcaaacccacttctaactttatgtgcctagtggtcccttacaaatttcaggtttttatttgatctttatcacaataatgttcaaaagtcttgcttgttttatctcatccatcatctcaactccttttcattcttttaacctttcctataccctacaaccttcaccatagaatagtgtttatgataatatggtttagactcagtgcttcagtcaaatttcagatttgctactaattcactgagtgattttgggcaaatgaaataatgtaaaaaaaaaaaaaaggattcggcacagagccatgaacaattaagcacatgatgaatatatattttatatatttctatatctcttttatatgatagctgtaatttcaaattttctttctaaagccctcatgcaagcctttcatcacataatttacataacaaaacatttttcaaaaggctcatagtgcttacccaaaagtttaagtctattcacatttggtatgctatctcaatttaaagcctctcccatttctcctctatctgaaaaacttcaattcaacccaaaggttttacttgccatttcccagaatccaagtacttctctgagtatttgatctcttagttcctctgcccttgcaatgctctcttctccacctgtctaaattctgccttcctttaaataaaatgagcatgcctaccattgtctctatccatccccacttgaaatgatatctccatcctctgcactgcgagtacacaattttctgtaatgttagatgacaaatattatctggggtcagttattctgttacagtcttgaactcttcattaaaggtctattttttgggtacagtgtttactgctcaggtgatgggtgcaccaaaatcccagaaatcaccactaaaggactaattcatgtaaccaaacaccatctgttccccaaaaacctatggaaataaaaattcaaagtctatttttttcatattgtattttgcatttctctttgttatatcttgtctatccaactagtttataaatccatttaaggtagggcctgcatccaatgttttctatccccatatccatctagaacagcatcttgctcacagcagttgctcaattcatgatttttaatgcagtaaaataatgaaattttgagatagaaccaaatatatatgaatttctaagttatgcacatgtacttctatcaatacgtaaaatatgagtgaaggtcaacttctttttaattgttttatttttagagattcaggggttatgtatgcaggtttgttacatgggtgtgttgcatagtggtagggtttgggcttccagtgaacgctgtacccaataggtaatttttcaaccctcatctcctcccacctttcttccttttttagtccccagagtctgttatttccttctgttatgtccatgtgtacacagtatttagctctcatttataagtgagaagatgtgatatttgtctagttcttagttattttacttaggatagtggcctccagctctatccatgttgctgtaaaagacatgatttcattcttttttatggctgtatagcattccatggtgtatatatacaatattttctttaattatccattgaaagtttctgaggttgattccatgactttgctactgtgactagtgctgcgataaacatacaaatgcaggtgtctttttgatataatgatttcttttcatttgggtagatattcagcagtgaggttgctgggtcaactggtcattctctttttaggtctttgataaatcttcatgctgtttcccataaaggttgtgtgaatttacattcctaccatcagcatcccataattattcccttttcttcgcattcttgctaacatctgttgtttttgatgttttaataatagccattctgactaacgtaagatggtatctcattgtggtttgaatttacacttcctgataattagtgatactgagcatttttttttgtatatttgttggttacctgtatatcttcttttgagaagtgtctgttcatgtcctctgaccacattttagtagagttccatttcttaattgcttttagatatttaaataaaaagcagtgattttgttttcttcttatgccccaataaactatgtggattctctcacagcctgtcagccctttttctatctttctttgtgttccttagctgccccctttttggtatgtacactttgtttctgttccttaaatattagccttccaggggttcaattcttggccactgcttttttcaatctacccttctctttcacccattctaagaaattttccatcatctgtatggctcctagatgtgtagctctagttcttacttcttgcatgagctctagattagttagatagcaaatatttggaatgtatgtttgctgaccttaagtgcatattttttctgagcttatgacctctttcccacaacctgcttctccttcagtattgtttcttacctggtcataccattgctcatctactcagaacaacagacacttaggaatcatcctattctctctcctccctgagacttctccacatgcaatcataaattactgataattttacttacaaatatttttgaaataagttccattttatatttctttttccattatcttatttgaggttttcattgttatctagactatttcggtcactttctgcttccccgccggcttttttttcctggaagatttcaccctctgttttcccttgtggaaaatgcaggttggaccatgtttactcccttgttaaagcctttcaatttgtccccgtaaactaccacatacattttatgtttttttagaaaaatgtagaggatcctccatgatctatccttatctctctttccattcttatctctaacctcttcccatctcactcaggatactttaatagtgatgatgatgataatagtaattgttattataatgtgaagaagaatatggagaaagatgagaaagagaaggaaaaagatttttaaaaaccataatgatagcaagtgctggatgctcatcaccgtgccaattacttaacatttatcatttcgttcaagcctcacaatctgtgaagtaggtactatttttttgtttgtttgttttattgatgcagagactatgtctgcttggaaggcagaactctttcactgatgttcacatagacagtaagtgagtaagcttatgcaattacataaaatcaccgtactatcccaggccttgttggttgtttgtttatgttgttggtactatcttgaatacattttcttcttatctagctttaaccatcttttcaaggatcagctcagatttggttaaaggtccttcttcaaagcattcagtttataataaaaactatgattttagaatttatattgttttaaaataactgatttatttcaatgcctccccattagattgcactttctttgagtgctggagccatgtcttagttagctgtttccactactttcccgagttattgaaagtaagcatagatgcaacacatttgtaaaacaaattttatgaaaagtgggaaaacataagtgtagtggtggagtaattattgtaagaaatctgtaatggagagtgaacatgtaagttttctgggaaaatgagactaccactttccttttaaaattagaatccaaaacttccaaggttcagcacagggagtaaatactaccttcagatgggccaaggtggctgacctatggtctgccctctacctgaggttcatcttctccttggtgccttcttactcccttgggtgctgccttacatttattccctaagggtcatcacatgatcatttctgtccgtcacacttgggagcaagatctagaaagtaaggaaactaggctatcctgagaacataaactctatgaaatcagaaattttttaaaaaatcactagtctattcctctgcctataacagtgctgacactttataagttcttcagaaatatttgtggaatgaatgttaaattaagccctctttttcttgttttcttttcccacagacatgttgagatggtacttccagaatatttcattaattcttaaagaatgaaataagaaaaaaagagataaagcagcaggtttatgaaatatatattactgctttaatcccctttaacttatttctccactcatagctagctttgacccaaaatcctttccatcagctttcttataataggcaacaagttggtctaaatatggaaaacatgcctggctccatgtctgattttacacatacggcactatctttcacacaatcaccttgcaacttcttcctagacttcttgtcatctctgtcagcaatttccaaagcagcatattcccacagtgcaacttgaatcaccactacctctcagttcagattctagataagaaaatccaatttcttatgaccgacatcgggaacatcctcacatttgaaatcatgctagagatttctagttctaggtaagatggagtgaacacactccatcctgtaacttccactgaatacatgcttaaaaaaaacttagaatgcatgaagcttctgtttgaagattctgaaatgaaacagcagaaagtggctgggagaagaataacagaattacagtgtcactgaactagcatgagtttactgttttttattcttctagaataaattctaccattttttttttagtttctcagccagtgagaaagtgggcactggagtgcagatagaatgagtgtcaaaagaagccctcagttctggctcaaagagcaagaaaggacgctcataacacagagagaatgtgggaatcttccatttatttttcgctttctttactccattcttctatatcccaggccccagggaatcctgtggtgaaagtggcagagactagtaacaggcatctacaggaggcaaaactctgagaggggagactttctctacattcagtggtcctatggtgcaagagggatgaaccaattccttttttttctttgacttcccatcacttggcaccagttgcaaacacagctgcagaagtgcacagcagagcaaagcctcacctttctaaatagaagaccaaaatgatgagtcccacgaactgaggattattgaggaaatcgtggagagagaaaaatttgggaaagtgattccaaaaagttgttaatgagtgactctgagatcatgcatgtgaaaccacttccattgatcatactgaaaattttgacatctaaacaaatacataaaccaacccctatatttcaggcatatatgcaggccagatccaaaaatcaccacaaaagacctaaaaagcgaactggcagcccacagaaggtggggtggaacttacagtctgaatctaaccgtatctgtctactcttttgcatatcatttgcattttttgtcaccatacctgtctgctaaaaagaaactacgaatacagtctgtaatattaagtagaacctcataaaataatatatgtaatatacaataggactctcataaaataaaactcaaaacatccagagtataattcaaaaatatgcagcatataaagaaccagaaaaatctcaaatcacaagaaaagacaatcaacatacagcaatgctgaaatgacacacacagatgttaaaattatctaacaaggactttagagcagctattataaagatgttgctgcaagcaatcatgaccactcttgaaaccaaaagaaagctttaggaaatgaatagaagatacaaagaaccaaatgggaattttagcaccaaaaaatacaataatcaaaattaagtgattctatacccaatgtacagagatgtgaattcatccttataggcccacttttataaccatacgttaagatagtgccataaccattatacacatgcaaacacacacacacagacatacgcacacacacacacacccccaacacatgaaatacatggatacagaaagagaaatgagaacgttttaagtatttcaagtgaaagtaattaagaataaataaaatctacatgttgaagttgttcccatgattcatatctagctatctatggtgcatattgttttgtagaattaagcctgagtattttataatttgtggagattgattattctgcacttaaaaagtagaagcccattgttaaaaagtactctatgtacataagcagcaattctatttacaaagaattgccctaatgtgtctatttgcatatcatttgcatatttgtctccatacctgtcaatcagctccagcaatgagcaaatcaggtagcccataggggaacctgggcccaaagaaaaaaaaaatccaaggtgatctaaggtggatgaaacacttatgcatttattttttaaggcaatattcttgaaaaaaacatatggtataaaaacaggtaatttggatgtcttaacaaatatagcttttcatctttgaataattttatttttcatacacttgagggatattgtttaattttagtcctttttgtattttcttcaaattatcaggctaggctaaagtacttccaactactaaataatactcagtggcaaatttactctaaatttactttttaatttttaatttgcttggcatgtattatttctgggaatattcttacatatgtgaaagcagcaaatatttaaagtttagaaaaattttaaaattcaagattgctaaaagatacttagaaataccaaagttatagttatgaatttcaacactagattcatggatttggtcataagcaaaaggcaaactgatatttcaagaacaaaacctccaggatgttgagtaacactctccctttcaggtagaatttctgtggttttctcctggtgcttatatttcagcttgcaagataaaccctctgtgaatgatgacacaaggaaaatcctgcttgcttaataatgaagcttccagaactgatgtttctttggggggtaatatccagttattgtgtctgcagaatcctgggacggggaagatgcttagtaatcgttatcatgatgatcactctgtatggttgctgaaagagaggggcctacattagacctcctacgcagcacagcagtactagctggcaaaaagtattttccaatgggtaaaatatttgatttagtttatgcatggcgttatgaagctaacttttgcacatggtgcacaatgcaattaatattttgaccctaatcatgaaaaaatgggaagttggcaccaaattcactttctaagttaattgtaaagttggggccttgggatccttcttggaaagtgtggtccctgccaggcgctttcctttgcattaaatctgtgactgcactaacattcattaaaaggggggaaataacccaatcaacaagtttgcttaaacggacgacctttctttgttaaaacttgtacacaaaagagatgttgtatgggaagtaaggactaagaaaaaaacattgtagcaatttgctgaacatggagacttattgaggatgcagtcctgaataatacacactagctttgctcttcctctttagtctgtgtggagaagctatgaatcattcatggtctcccagctgagaagggcttcaaaggggatggttctgattggatgtcctgtgtgaattgccatgctgcagaatctgctacacccctagcactggagggtggaggaagcactttcatctgggcctccaaagtgtttagggtcacagttcaccaggagataacgatgtagatgtacattcagaattagctgcagagatacctgtgtagtgcggtgtggaaaagtgagccagttagatccccagtggatgctgtgaatcaattactgtattctgaatacaaggttggctgcaggggataaacagatgtcagagaatttttccctaataagaccctggtaatagaaaagcactgtcagcttcattttgcattaaaaatctcatttcctctttatatgaccaattttattaggtccctaaacaaagatattttgtgtaactgttagcagcataatgtgaatggtgtcactaaatttcatattttcaggtttagtcacaaaaatcaagagggaaaatatgagtctatctaaagtcccaacttgaggaggtctaatcaaaagggctctatgtgagtctgttcacatgctgattggtaatgcttgattttcattttaaatcagaaatatcaaaattcttaaagaatataatcctcagagtgtaaattaaagctaaattttaaatttctctgcactttttcattttctttcatgggtgacacttccataaaattgccctaactaaagctcaaacaccatttatcttttctgggtaatttcttttttgaagccttatgctgggagatacctctgacatgctaaatttcctaacccaaacatcaatcttttaaaaaaggaaattgacactcgaatccttccctctataccctttggaggcccaaattgaagtagaaacatcattttgagctttctgctaatatccaattaacctctcccttcatctgcaactctcctaaaagagagagaatctccttcaggctgtcaagtagtatattttctgcatacagctccaagtggagaaggcagaagcagagaaggtgatgtgagttcactttacagtgtctcctattgatttgctgagaaaatataattttaagattcactagactccgatcctccaaatgtaaaaacctttgtttcaaacatctaaaagtgaagacaggtcaaggaagagctatttctttatgatcagaagaagacaaaaataacgaaacttacatggtgaaattattcaaatgacatagacaaataaattcatataagttggaaatttataatgacaaagttagagctccagggatgaaaagacgttaaaattcccaaacatgcacgcgcacacacacacacgcacgcacacacacatacacacgcacacacacacaaacacattaatgcatacatatatgtgtttataaataaaattgtaaagcttaaatatgttgactgatctgatgttattaattttgttattgtctatttatgtgtgactattatgcattctctggagctatactaattgtgttggcagaactctacagatcatggggctaaagtcgaaaggaatgctacttttgcaatacacagttggtcagctcattccccaaaagaaattttagtatataacagactttgacaaagctgcagcaggtggcgctcttcccctggcatgggtgctggctggagcaattccctccgggtgggttcccctgttggatgtactaaattagggtgatgcgttagggcaaaaaacaaacaaacaaacaaaaaccttgagattgtaattgttcaagaatgatgtcctgtcagtatcacaatctgcataatccaattcctctttccagtattcttttttcaatttcattttaatttggcattcctcatttattagactaaattttgggtaacaagttgctggtacacttgagtacctcctatgtttctatccagaagtggatacatttctatcattccttcaatcacttttgcacagataccattccagagggtttctttcaaacaaaatgaatggcattatttattgaccataggtgcatgccaattaataatagatagattaagcaaggtgaaaagtaaatcttcaagactattgacagattgagtattaagtaaagcattcctggaagatgagaatttaagtggcattagtccataggtaataatatttctgtagaggtttaagttaattattcatatttatcacaattctaaaaagctgctttaaaaagtgaaccccaaatcaaaagtatgtccccttactacaaaccccattattctgttactacaacactctctgtttattgttaagagatgaatatatgtacttatcatgttgaggcataaggtttttatggataattaatatcgtagctattaaaagaactgatgataaaaaattaataataaattagctagctactttgatttttatttgaggcctcctcatctatttttttatgtaaagcacaggttgccttgccatcttgaagaaaaccccgaagaatatggaaaacaagttttcttattcaatttccaaagtagaaaataggaaaactagtcactgagacagaatgaacttcgatacaaatattaaagtaggagttcacaagggcaaagtagcaatttttcagtttggagactgaaggtctatgaaagagtgtgcctacaaacaagagctctgatttgactttgtttgctttctccatgtctgggaaataactctaatataaatggaatttcttgattgtccacgaatagcattaacaaaattaatgtttgatttactactatttataggtcactaaaatctcaattgcacgttagatgaggaaagttcagattttatttatttgtcctagataagggcctactaattttcctcattatttcttcccacaaaacagacatttcctatggtaacattttttgactagaaaatttgaatattttcatggatagttaaattcaaggtgttgaaagtgtggtaggttctcttaagtggtttgaaaataaaagatgacatagatgaacatacgtgatattgaaatatacagcctaaccaaagttttaaaaaatctttcaatcacttatcttgatgtgttcgtcaggcagagagatcatgatctgcatagtacctattaaatagaaaggaccacgaggtttaagtgtcccagagcagagagatcatgcctcattaattcagtgtagcaacatctttagcacacagttcatgcttaataaacaaataaagaattgagtcaaaaccacttacatgaggaatggagtttatttcttaatggtattgatacataacagttgtacacttaggagggatacaggtgatattttgatacatgaagacaatatgtattgatgaaatcaaaaatagagatatctatcacctcaaaaatgtatcttttctttgtgttgagaacgttacaattcttctagctatttttaaataagattctttaattctaattagatagcagtgtatggtgagcatttaacagttttggggggaatgttgtaaaaagtcaaagttttaatattttagtctaaaatagggagaacgataattaaacaaatgaatgttttaatgatttaaagtttgaagaaagataattaaataagtaaatgtggtatgatggttaagtgccacctaatctggttattggtgtcaagtatggcctctccggggtgatggcatctaatctgagcctagatctgaggatcttgtagaagtcagtggataacatgagggttcatggtgcaggacagtgatggatgatcaggcagaaggaagaatatgtaccaggaagcacataattcaatgacttgtcattaagtaaggccactggacaaaattaaaaatgtcagctgatatttttcataaatctgaaggtaattatgaagacacagatggggagagaaagagcttctgaattaaaactatgattggataaatagaaatgatacagaaatggtccataattttacaggaagtttgttttatatgtactttcagttattcagacatgataatagccagaaaacaaaaacaatttgccagaatcaaattatggtatttaaaaggacacaacaaatgatagttttatagcattaaatatcaataaacaataaacaatcttctctaaaatgtggaagataaaaagtgctaccacaacaacatgaaaatcattgaagatcaaattataggtttataatgttatggtggtatccaattttctttatggtcttaacttgttcatgaatacccaaggaaatgtaagtcatctattacgaataggaagaaaagcattctcttgctcctctgtttttcttgtgttcaaagagacagctaagatgtcaaattcatataatttgtataattcttcttttatcattattgtaaatttggtaatagaaaataaacacagagataatccatacattttaaggttatttggctgacagtggggtctcacacaatctctagtgggggaatgatacagtcacacatctgtcatctcaacattggccctcagttgcccactaacatggatttagctgttcctcagtagagttttgtcaaaggaaagctacaatcaacactacttaaataagaggcctactgaaagaatctggtgagactgttaaaagagtaatatgacacaattttatattgtttgattctgttctatttgtggtattaaggaaatggatgtcaatttactgttcattggcaggaccagctacataattttgggggctcagggcaaaatgtaaatcaaaggttgcttattcaaacattcctaagactcaagactgtaatagcagggcaataagccaagagtggggttatatacggctgcataggcttgtatgtgcaggaagcctaccctgattcctggtatggtacatcggtacaaaccatacttggttaatgataatgagatgttggcataaacattcactctgagaaggaagcccctgagaagtctacccctgaaagagcagcatgccactgttgggacttccccattagactaagaggtcatccatcagtttctctgtactataaggaagaagatggaggcaaaggtgagtagagagcacaagattaggcagcaggtatcaaagtagggtttgtttctttacattaaaagataactagtaaactgaatgaatatcaagcaaagaaaaattctgccttcaatataatacgctgatttttataaaaaagtatacttttgattttccaaacatccctctgcacacaactccatgtgttagaagagaattatcagccatgagtataaagtatacaataagaacaattcccagttgtctgattgcaagcaaaagatttatttgaaaagaagaattgtcatttcaacttcataagcaatttggtttctctatgtgcttattgataggtgctattttcacaattcagcactaattattaacttgtattttcaggagggtatgcatataattttcactattcccaagggatatttgtaaataacactttagagcagaggctgaaaatgtgtttagctctcacttctagttgcatattacctcccattataatcctgttgagaagtcataagtgttagctggtattatacctccacactcaaggtacccatatttcagaaagaatagaggagttttctgttagaggagcatggaatgagaagttggtccctggatactttttcattttagtggcatgccattagcatcttgaatatttcaatgtatgcacaagaaagttcataaggggataaaataacaataataatgtcagatttacatagagtcttatactaaaaactcttaaactgcttccaaagcaggatcagatcagatacttatctgagctccttttcattttctttttttatttttgaaaaaatagaaatacaaaatactggtaatttacagttatattgctttcttttgcaccgcaagaattcattttattacttaagtgtaatttttctaaaaagagatgaaaacatgcttttttttctatttgatcatcagtaactagaacattgtttatttggagtttttctctgtgtataatttaagttaatactataattttaaaatgctgaatgtagaatttttaatgttcctaacactattttgaaaccaataaaattaatctttgctattgaattaaattcagtaaacaattattggaactcattatgactaaagtatataccaggtgtctaaggaatgctaaagtgagcaaggcgtggtgactggccttcaagacattcatgatccaccagtatcatgggggtcatccacaagccagctgtggtaagccctcctggagaattataagcacgatgtgatgagagaacaaaccaggaaattatgtcctggaaaaggtaacatataagccttaaagaatgattaagaattaaaatgttctgcatggcagataaagagatgagcctaagaaagtatgaaggaaagagaataccaatgaattgggaaataatgatcaagtttattggtttcaagggtcttttaagagggtagaaggacaaatatgtctatctccataataagcttctgtaattcattctttatataatgtggaattttatgaaatggggagtggcattatgtcagacttgtgcaagatggaccagaagagataaaccacattcagattgtgaaagaatctttcctagttttatcactgtctatgcttaaatatcctgaaatcttttatcctttagagaaagcaggtaatggtggtggtgatggtggtagtagtgagaaacttataactaaaaccatattcaggaagttataagcaggttttgtcaaatagacatgcttctgtgaaaagataagaatgatgtagttcagttgtttgctaatagcaattttaaaatgggttaaaaaacctaccttcttcagaaaaataacaacttctgtgtttgctttactacttttagatagaggaacatttcagtctaaacattgcagtataaaattaattttaaataagtgaattataaattaatagtttaaaaaaatttgcagactattttgatatatttgtgagtgactgagggacatcaatgaatgctctcttgacctgcagtgatagtattactccagaaatgaaataaaaacttttctcaagcatgagaacaaaggacatcattcataactcacagattagtttacgtataaaaaatattctatctacatcattgaagcaagtaattgttaaagaaatccttttccatggattatgaaatctttcaatacagctaaattgtgcaagctccatgattactaatttcaagtttgaatttctgcttctgacctgtttttttattttgttcttcaaatcttattccttgaggcttgccccaccctctgtggttttatatcttttctcctgagtatatacataacctatttgtttggttactcagactgaagcttcagaccaaggaattggaagttgctgcctcttgacagcttgtgctttattcttctatcataaaaaggatcctaagtaaagaacaccagcagtgacttgtgtagcttctgggcatttttttgttcttgtgatctaaagtccacttattgtgttttctgttatttggaggtcatcaaactttgatcactagaggggagtgtggggttttgccttgatcttggagatcacactacaggctgatttttaaaaacacatatgaagggtttattgtaaaataaagccatgattcattagtgtcaatgtaaatgtttaagaattgtgtaattcaaaacagcactgattagaattaatttataaatggagatggaaacatggctagtgatacccaaaatcctcaaattcatttggatatgccgtaaaatctgatgttgctctccttttctacatccatgtggccagatgtgtacacacctaccgttgggttatcacatattaatatggaatggaggtggtcagaagggtctccatgccatgtgcctattttgtctactggttactgcatgctataatcatatggaaaagattaaatttccttatctttgaatgatagtacaattgcttttgaaaatgtaaatgagtgtgccccccaataaatggaagcaacaagttcttttatttattaagtcatttatcaccagaaaaaatttatagatcatgaaggaacctgggccttaatgaccttcatccttgcccaaggtcactgagctagacaaaagacatgtttctctaacattcacctcctaagaccagttcagtgcttccttccatgccaatatgtattatgatacattttttacaaattcacaaaccaaataatattttagcagagatggattttttgttgtctaaattattaattttaattatacagatagaattaacaaatggttcccaaatttatcttgattccattgtattgatagattttctactttgagggagcatttcatgacagtaaagaagaattaagatcatttgaaacccagtgagaattagaggatatatgaaagtatagatttttttcttgtcttttgaaatgagtggttttaggcttacctcttcccgagtatctccaaaatgttccttttattattattctgttttctatactcaaatagaaaacaatctaaacaaagtactgaagaataatcagacaccttctaagtagaaagcaaacctaagtaattcaaattaagaaatatgtttaaatgtctcagatttgcctgtcacctccagagaatgggtttccttcctcctggctgggaggactacccatgacatgaattctctcaaatatttatttaatcactcataaacaaattaaatggtggctatatatatagaaagtgttgcatcaaattcaggtagtgagcaaagacagaatataaaacatataatccctggcctgaaagaattacctgtattattaggaaaatatacacaacttaaaaaataattttgaaaaatacgattaaaattaaagatgtcataaatatcatatttgctagaagaagtcagaaagtggatggatattgaaagatggttagaatttggtaagtggagaaacgaaaagaaggcttttaagctaagtatagatagaaagacttggcgccagcaatatgtgacccaggtttggagaataatgagttggtcaatttggttccaatggagagtgtgtaaggaagtagctgaagttaattttgaagcaacactaaaagaccttgaatgccacaaggaactatgcatttgattcctacagacaagcatctttcaaacggttcctttgtatgacaatccttgttaggaataaagatctgtggttgaataattggaaaagtcctgtcaaccctgacccgtttggagatttccatgaacatctgaacatgttaaaggttctgagatctattcttaaaaatgccatctgatcatgtttaacttaccattttctcattacttttaatttcaaaaccccttgctttgcctatcatttgtggcatcatatgttctaatgtggaatatttctcagaaaaaaatttgggtttttctgcagaagagaacaataaaatctttaaattggaaaatagtacaatggaatttctcttttagagaggtacatgtgaaagtcatataaattcaaataacttctgtccaattaagcaggaactgggatatacagtctgtccaattttgtgcttaatgggttgttcacggtggtgtttaccatttcaacaattggattactagattttattgttttcaggcactatcaaatataataaatcattgtaatgttcaacaagtttgacaagattctcccactagaatttgtaaagtgatgagtcgcttcaaatattaacacgcttaataaatattgaatgacctcctatagtaaaaagaaaacttatttacaaagcaaaggaaaatgagcaacacacaaatgtgataatcatagcttctaattgatgaaggtgaaatggagcaaataggagtctttaggctctatgcaatgataattaaagtcagttaaacctttttgtggtatgtttattattgtcattgtcttgaatgagatgtttactcatgtttggtaattatgcctaagttgggttttaagagagaatcttcacattctaacccgatgctgtagaagaatgagaacatttttctaggaaaggtattttctaagccaggctcaccttgatatttagctctgcttgggattttagctttttcaatctacgtcagattgaaaggcattaagatttcctctcccgaaagtttctaaacccacaaacatcacttagtcatttggcaatgtcaatgtaatgctagagtaataaccctgccataaaaagcagggtttctgaaatctatcacagaaataacaagcgtgagtagacattaaaaataaaagcttcttcatagcaacaactcaaggggtggtaagaattaagagaataacataacaggagcttatttctaaactgctataccttctgaaaatacttggatttattcattcttcagtaaaagttcatttatgtatctatttaaagtgaaaaataaaaatcgtacatatttatggtgtacaacattatgttgtgacatatgtatacattgtctaatggctaaaccaagctaaagttttgcagataggaactatcaaagctatcataactatcttgtgtgcaatgaggaagaggaaaagaaatgtgtacttatacatacatggagacacacacagaccagcaaagggtttttgaaaaaggcttctaagtgttctattaaccacaagatcaattcctccataggaagaagggaggagaggaaaaggcaaggctttcatctgagagtgaggaagaccttgagaaattagtgcattaatatcaaagtgaatgaaattttgatataacaaaatatttccaaatcagtagacaattcatctagatccataagggttccagagaaacagaaccaattgcatatataagtaaagaaattcattgcaaggaattggttcacacacttgtggggctggctgggcaagcttgaaatctgtagggcaggccattcggacaggcagactggaaactctcaggcaggagctgaaaactcaatccacttcctaagtctttttagctaattgaatcaggctcacccaaatttttcagaataatcccttttagagaaagtcaactttaattttagacgctaatcacacctgcaaaataccttcagagcaacacctagattagggtttgattgaataactggctactacagcctcgccaaattgacaaatcatattgaccattacagcactcttctctcaagtactaaaggttaaattaattaagccgtggtccatttggcctggtctatgtatgtatttggctatagatttctagaagtcagtgatatatgtgtagtaatatatgttaaggatgtaagaactcccattcgatctgttaaaatcattttgttaaatctgttaaaattattactaaacattgttacaagcactttagtacatactggagtctttctagtgagcaaagcagacgtgatcactgaaatgatagtggaacatagagacagtttatatcaatgttttcaattagtgttttcccaattactaattataaatcatcaaggaaaaaaaagtattcggctttgtacaagcaagctagattgagtattaagcattcattcattcaaagaacccatattaaatctttatttttttcaaatatcatgtttttaaaaactaaatttaattgcatatatttaaggtgtataacatgttatgcaatatgtatagatatttcaaaggttactatcgtaaagtaaattaacatatccattttctcacatactcattttttgtttttgtggcaagagtagctaaaatctactaatttagcaggaatcctgaatacagtacaattttgttacctacagacttcgtgttgtgtattggatttctagacgtgttcatcctgtatatctggtactttgcatcctctcacctacatctgccaatttgcttcccactccccaccttgctcttgatagccactgatttattgtatgcccatgtatgtatacatattttgtttgtacagtagtttttccttcttcccagttttgtttctaatattttaattacctattgttaattataatataataaaacattgcaagagagagaccacactcatataacttttattgcaatatatttttataattgtttgatttcattagtagttactgttgttaatctcttactgtatctaatttacaaattaaactttatcataggtatgtatgcgtagaaacatagtatgtataaggttctgaactatctgtggcttcaggcatccactgggggtcttcaaatgcatcccccaaggtaaagaaagatggtgactagtatacatttgaattgtttttgagattactacttgataccgagcctttacaggtttgggggtatcaaaatgaatgataaggtactcatgggggctagaagtttggaagggtctgccagagatgggctcagaacggctcactctattggtgatgcctaggaagaattgacccagaaagtgaggtctgagctatgtttttagagagacctttgccaaatggagaatagtgatccaggcttaaatgggaggatcctataccttacaacaatgaaccctgggaaaggtacatctgaaaaagagaccagtaaattgttatctggcctctatttcttgccgtatctcctttatcaaagagaataataagtggatggaaaaatactgatataaggaataaaacctacaatcgttggaaagattgcacttgattcttagtctcttagacctgcaagatgataagagagcatggtcttccattattgagatctcctgttggatccttctgcaggcaaatctgcatgtctggagagatgatgaggttaatcagaaagggaaatagaaaaaaggagaaaacatggaggaaatgatatcttctgactaggctcaggagaacataagctccaatggagtgctctgttttgggggatagtgttgtcagcgtgctccagctatttcatttctattatgttgtgtgaaactcacatattactgataaaaagactgagactcagtgagtttgagtgatttgcccaaggtcacatgtcagagagcttgcgattgtaggtaagttggttcacagctggggcttcagtcttgttttcattatgcctttaagtcaattatcagtacaaggtgtgaaatgaagctatatgttagcagttcttctggcaatagataatagctgtttctcatcatcaaatccaataaatgtcctgcactaaaatacagagttagacttaataattgcttgaaaagagacttgttcttagttaactattttgctaaagaataaaactcttctcagctctccattttaatgagatttctagatttttttaaatagaaaatttattgatctttccctcattttacaaaatgtgatataaattcattactaaatctgccttaaattttatttaaaataaacatttttttctactttatggactttttgattttataattgtatttatagctaaattaataattcctcatgtctataattcagctaatttgtgtacctttctgtgattcattatttagttgacatgcattagtaatatgaatatatttttattgatgtagacataattttccatcagtggatttataataaatgtatgttttcagttctttctgtgtagctgttctctcatacccatttctcagttgctattggtggtgaaaaataagtattagttttcttttttttctgaattaaaaagatgtcaatattaaaaggaaactattgcaattgtgggaaagagcaaccagttcttcatgttttttgtgttgctctcatggagttttacatcctcttcactcattcctttgtcttttgttaagagtaatgtattctgtgtcagttgcattttcaggcttctccaatgcacagactgccaaaattacaagattatgtacaataggtttatgttgtggatgtctgtccaccagggacgtaacaagctgaaattgtcaacttggacttcaaccaatggcctagagctaaaaagtgagtgaaatttcaactgtgctgcagaacacttacaagtgtgtcttcattaaatcaatgatgttctccaaaagagaattacttccagtcaaaaatacaattttgctctattatcagatggtataaaaaaaattcaataaataaagtttcagccaaatgctaaaaggcagattgtaccttggcacccctttcacttagagatgatcttcataagaagtggcacgtcatgtgacgtcatgtcagcatagtctctgaaggactataatccctaaatgataattagttggatggaagcttcaaaagtacaacatctggtggattaccatcatcccttttattcttgggaactcttttgatctgtttggatctagaaagaaaaaataattatttcttgactgtacttggtgcttaaaatgctacgaagacagtgttgagagctttattcatttattcattgtgattttgttacggcttcttgatatgatattgtgcttaaaaactgtatctattaactttcaaagaagtagaaaatacatagcatattctagtctgttaggtgaacaaatacttttcatagtcattctataatttactgtttgaacacagaggcacaaactaagtgaattctgggggcaatttagaagaaaatagcctcctttcagagcaaaatactcctaaggaagcttactaagacttcaagtgtattcactttatcaaaatggatttctgaacaatatgaaatgcaagaatgttggttgggaatatttggggtcatttaaaaattaaagtacacacatctagacatgaatgaaactctgaaatctggaaatgaaatataagtcagttcagttgacccaacatgctggagatatcctctaaggctagaattttcagtttaagcataaagctactgaataaaaagcaatttctgaatttactttttttttttttttttttttgctggagtgtagtggcgtgatcttggctcactgcaacctcttccttccagtttcaagtggttctcctgcctcagcctcctgagtagctggaattacaggtgcccgccaccactcccggctaattttttacatatttgtatatgtatttttttacatatgtatttatatatgtatttttttacatatatatacacatatagacatatatatacacacatatatacatatatacagggtcaataaataccaatgagtgtataaaagtattagacatggcagtagagatatatatatagtatacgtatatgtagagagatatatatagtatatatgtagagatatatatagtatatatgtagatatatatagtatatatatgtagatatatatagtatatatgtagatatatatagtatatatatgtagatatatatatagtatatatgtatatatagtagatatatagtatatatgtagatatatatatagtatatatatgtagatatacatatatctattgccatgtctaatatttttacacactcattagtatttattgaccctgtcctgcttattattatcaaacccacctctccttttctcttttcctacctagatatactcagttttgtcagatatacatgtactttacatttttaagatgaataacatttaaattccatcttgtaatcataattctgtgcctggtctatagctcattctaaaagatgaaagtaaattaaaggcatttacattatcaggattatattaaattgcattcattacaaagccaattggtgatagaggatttctctacaaattcaccatcagattccctggcccactctaaggtgaagaatactatcaacaaggttaaatggatttccttacacaccataaattgctcaatattgtgtcatattttgggttatttctgatatctactatgacatttcctagacattttctctacttgtagtttctagatgcctctcagttttttctaagaaaaaaatcataatttctcatcctattactaaaatctttcagttgttatttattttattttgtaagaaatacattcaatttctttagcattttcttggaaatcactgtcaacgtatccatgcggactgctgatggctatccaagcttgatgcatagctatcatcgtggaatttcatctttctatttgctgagttaattctactattgaccaaatcttatttgtccttcttatatctttatcctggactacccatcaagtgaatatttcagaaaggataattggaaggtatatatcttaagtctgtatatatctaaaaatactttgtttgtctttcacacactaatattctaagtataaaattggtattgatttgtgatcatgacaaattatcaaacatagtggcctaaagcaactcaaatttattatcttacagttctatagataagaagtacaaaacaagttttaggctaaaatcaaggtatcagcaggtgtcagaagctctatggataatcatagaagctcagtaggactatgtccttttctggtttctctagggaataatctttttactgttcattcagactgttggcagtttgttccttgagcttgtggtatgaaggtccctattttattgctggttgtaaactgaaggctgttgtcagtttccagaggtcactgcattctttggcttccttccattttcaaagtcacaatgacaggcctaatgctcactacacacctctctgaccctcctaattgtcacatctctttctgatccagccagcaaaggctctccaaaaaaagtgatgcccgcaaggatataatctccacatctcaaggtctgtaaccttaatcacatctgcagagtcccttttgctatgtaaggcaacatatttacaggtttgggtattaggtcataagaatctttagtagccattattcgacttatattcaaaaacatttttcctgagaaatttaaaggcactattattttttttctcacacttgagaattcttgataaagtattttatgtcaattatattttcatttctctgttggtaatttcttatccctctgaaagatttagaaggctatcttcatccttgtaattctgagatttgatgcatctggttgtggtctttcttcaactcctcctgttttgcagccagaaggccctagcaatatgacttctctggtctttctttagtttaagaaaaatttcttccagtatttttttttgaatgaatgatcctcaccctacttttcatccctaccattaggcccatgcctaaggcatttagtacatgtttgtgtgagtgagagttgataagactggacatatagatttggctgtcaagagcataagaaaattgacaatgtgtatacattaagaagatgccagagaagaaaccaaaaagaatactttaatttaaggctgaggagagaaaaagcaaaggccaggtgtctgtggcatggcaacctgaaggcggaaagtacttctagtgaaattctatcccctaaacttcttcaatctcctcccaaatcatagagatctgtttaatttttcagaattatagaagttattctggtctgctaaaaagaggtttattaatgctgcataatttgaaactgcactgtaaactataaactgctgttaatatgattgctatgatctcagaatgctttcatcctttcagtaagtacttactaacatttcttatgagaatgcaatcaagcctcaatgattccgagtctttttttcaccctcattactcttgccttgttatttctgttatattatatctgaaatatttacagtgcactgtaccagtacaatttttactgtagtcccaggaaaggggatatttgacatgaagattccagctctaaaaacagagaaaaacatttgagatagtggcttgcctgtttaaaaacattgaaggaaaaaagattgtaattaaaaatatccttcttttagatgtcatctgagcatggataatcatagaagctctatgtggttgagctataatgagcttttcagtactttccccaaagaacaatgttaggcagttcctaccatctcaacatctgaatatttttgcaacactggccccaaataaatgcttttatccggagtcactcttcttgtcctggtgattacaatagcaaggtagagaaaaataaatagggcctgctgtgcaaactaacattgtaatgaagatctaaatttgctcgttatcccttgaaacagcagttaggaggtacagaggggacgggatattgctgttcttttgcgtactctgcaaggagaaggaagcaatttgaataaaatatctgacaaataaactgttgggaatttgtcagaagtgtattcctggtctctgcaggaagtctgtgaagagagttgaaggcccataatgatgaggaagtctttgccctgtcttcgatttattgagctgataggggctctcttctgcaactggttctgtgtctgtgcctgccccatgagggacagccctgccctccatggcctaggcagctggttcaaatccaaaagatttctttggtggggttatttaacaggtgatgaatttttctatctgattcacatttgctttgcactcagatttggtgacctatgtaatttatgcctgaaccaatgatttatttttaagtatactgatggtctttacccaccaaaaaagaactgaaatatataagccatcttttagaaagctacctttaaagagaaccacaaaaatggcttattactttcaaagccacattttaaaaaagaaaatacccgcttctcaaatgagtcactctatagtttaaaatctagtgaaacatatatataatatataatctatattttaaaatgcaaatatttgattaaaaataactatttgaagaatcatttaaatgaatttaaaattacattatggtcttaaagtcataagcttaaatgtctacacaattaaacagtccataagaaactgaatctgatcaaattggggggttgagggtttataaaataccatacaataaaataaatgtgcttctatcaatctgaaaaacaaagcgaattgtgaggttggaaataccttcagaaagaatagtcaatttgtttctttgagacttaaaactaaagatttcttgccaaagcacatttatagtttcttaatataacaaaccatgtcatagtttgatttccatattcataaagatagtggagatttccttggcaatagaagaatatataagggagattctccggtaatagactccctatcttttgtgatttttaaaatatgtgtttgtttgcttgtttgttttttgctatcaagctagaaatcctctctggttgcagacccatcaccagggagagctcaaagcttctgttttcatttctgtcctgaaagagtctaatctgaagatttttaggaatgtcaatcctaggggcatggtgttctttcatattctctgagattctattgctctctcttgagagaaaggactgtatttctagtgaacaattcttgaagtcaaatgtatagccttacattttctactaccccaaacttagacttctctctagatctctccaactccagtagaatggctgactatattgtgtgagtctgtgttgtagctttctgagcttggacactcaggaacctcttggaaatatatgacctattctacattgtcttctcccagtcttagtccttccagatcttttgaattttccagggcttaagaacattttctattacaatagcaaaagaagttattttacctcaacctctgttttcctgaaacaatagaactgaaatatatgttatcctctaatgtcttcttattcctttcgagtaggcccagtttataaaacttaagcctgcattagattgtcccacacttctacctcctccaggattgtttgctggatcaagtccctaactttttttttcttttttccattattccaatttttattacaagacgaaaacatgcttatttaagctaataactctttgttctaaagattatcctatggtttcttttcaaatcctaaaaaagtatactgttgactgtgtatcttcactaactctggtgaaagcagtctaaattaatatgtaaaatataaagctacatcctctgcaataagttgagaaattggcatattaaacccaataacaagcagaagtaaaaaataataaagacaacagcagaaatcagtgaaatagaaaacaaaaataacaagtttaactaaccactagagaggctgaccaagagaaagagagaggagacagaatttacaaataccaggagtgaaaagaatggacatcataacaccctacagatattaaaggttaattagaaaatattacaaacaacttaatgcccataaatatgacaacttagataccatggattaatttctcaaaacatataaattaccaaagatcactaaagaataaataatctgaatagtcgtatatttatggaagaaattatattgatagttttaaaccttccaacaaataaaactccaagcccaaataaataaactcactgatgaattttactcaacatttgaagtgaaaactagcagttcctcacaatctcatctagatattagaaaaagatgggacatttcttacacattttctaagtacaatattactttttatgaaaatgagataaaaacattacaagaaaactataaactaatatacctcaggaacttagacattaaaatattctcaacaaaatactagcaaatcaaactcagtaacagataaaaaagaaaaacatgtcaagaccaagtgggttttatcctagggatacgaggcgggtctaacatgcaaaaattaataagtgccattattctatcaagagcctatagaagaaaaactatatagtcatctgaatagacacagaaaatcatttgacgtaagtaaacattaaaatctctcagcaagaagttattgaagggaatttccttaacttgataaggagcatctacaaaacctattggtaacaccatgcttcaggttggatgactaaatacattcctcctaaaattaggagcaaaccagaaatatctgctctcaccatttcaattcatcatcatactgggagtcccagccagtgcaataagacaagataaaataatgaaaatgtgacatatcaaaactgtgaatgcagcagaagtggtttttgagtatgaatgtttatctttcatcaaaattcatattttgaaatcctcaccacagaggtgatggtgctagtaggtagggctttggggagatgattagattatgggagtggagccctcatgaatgggatgtgtacccttataaaaaaggcctaagagagatcctttgccccttctgccatgtgaggttaaagtgaaaagatcactgtctatgaggaagaaggccctcatgagacagcaaattttctggcaccttgatcttggactttccagcatcaagacctgtaagaaataagtttctgttgtttataagccacccagtctatggtattttgtcatagcagccaaaatgggctaagacatatctatagtcttaaatgtttacattagaaaataaaggaatagaaattaatgagctaagcttccaatttcaaaagctaggaaaaaaactataaaatacactaaatacaaaataaaaaataaagatagagcaaaattattaaaatataaagtagatataaaaaagagaagataagaaggacaaatatattttacaaatataattaataatattgacaaaccattgacaagtctgaaaagaacaaaagagaaatggcacaaatgaacaacagaggaaattaagaagggggttaccacagatgctacagaaattttaacaaattaaggatagagaaaaaaattttcctaacatatttgaaaacttggaagaaatgggcacatttctagaaaaattttacttactaaagctcccttgaagagcaacatcatatttaaataattctatacccattgaagtaataaattcatagctaacagttttccacattaacaaaataaaaaaataaatattatcagactttcaggaaacaatgtcagtttcatagggaatattccaaataataggaaaaagagaaaatattccataatttacataaaaggctagcaacatcttcatgctaaaacctgacaagaacagtatgaagggaaaaaaatcacatttaataatcacattaattatgtatttaatatatttaataatatcagtgtaaaaatcctaaacaaaatataagcaacttgaatctaggaacatataaaaagtctgataaatcatgaacaagttgtgtaaagttgataaaagtgaattttccaagactgatctccacaggcagttccccctaaggggaagaaactgcctctagtaaaactgaccttctgagtggttccatggagacctgtgtgggcccggtgctcagacagaacagataagcctcaagacctgcaccccaaccactccatcaccatcatgccagggataagttccttctctaaccatgaaaactgatgtggtgacttctgccttcggctttgcatgtgataaagctactatgcaaagcttagaccaattctcagaccacaaaaggtgaagacctggcatccccttcagcaagccataaatgaatgcttagttcaactgatggagtagggctggggcaaagcctctgccacagcatattacagttgcatactgagccatagtgactccagacaggggctatagtcatgcagcggagaagctcacagaccaatgcttaaggtctcttgtctgatcctgtctgattgtagttcatgtgtatgcagtgtgacaggtatcacctgcctcagttcccatctcttggaggccaacatcaaggatgattgtctagtgaatgtccttagatttgatccattctcaggtaacataataatgaatgttatggaatgaacgcttgtatctccccaaaatgtgtaacccccagtgtgatgatatttaaacgtggagcctttgggaggtaattgggtttacatgaagtcatgagggtgtgtcacctgtgatgggctcagtgtctttccaagaggaggaagaaactgaaggtttctttctctttgcagtgtaggaatttagctcaaaggtgaccatctgaaagccaggaagagggccctcaccagaacccaaccatgctagcaccctgttttccaatttctagcctcccaaactgtgagaaaataaatttccgctgttgaagtcacccagtctatgttattttgtatggcagcccaagctggctaagatagtgaagaaatacaaagaaaggagagttgactcactctctagtgattggaatgtgctccttaccattctattgagctctctttcagtgtagttagacagagtagatccagcaacaaatgatgactgaacccctgattgaacatctgctgaattctccctgatccaggtttgatgatgtacactgcctttgtaagtaggcatttcagtaaaggtactaattcatcacagaatgaaatcaagaggaatagaggatattcctatgtgcttttactccactgaacattttaacagcgttgggttggggatgggcatctttgacagcttgcttccaattcaaaagaacctgagtgcattttcgtacatcttcagagcatttttctgttttctgaagagcttttcattcattgctgtgatagtcttgtcactcgttagtgttcagagggttagagttagagcttcttcagtttatatctttaaattatatcagcaggtgatcgtgaggctctttgttttcacagctgacttgggttatcattttaatcctagacactctaagattgaaaaacttagggagataccacatggtgaaagttatctaagttcagcagcaaatcacataaaagacatgttttttatccctattatatatcaataatatccagtcatgcatgacataacaatggttttgttaataacagaccagtggtcccataagattataacatgtttttgttgtaccttttctatgtttagatacaatacttactgttgcattacgatttcctacagtggtcagttcagtaacatgttgaactggtagcctcggaatgataggccatatagcctaggtgtgtagtacattataccatctacgtttgtgtaagtacactgtgtgatgttagcacaatgacaaaaatcacgaaaggatacatttctcagaacatatcctcatcgttaagtgatgtatgactgaaaataattttctagcacaaataccatgtctaaacaccaccaaatatagcaacacaaaaggtgcattccttttgaatttgatgcaccatctcctttggatagacctagctctctagtctgcctttatgtaagaatcaagtctttaagtattgtggtcctgtaagtgcacaatatatttaatccacttcctatactcttcacatagtcttaaatggaaatatagtccacaagcaactcaagaagttggcatccaggctatttacatcatctaagcaattaatcattgcatagtaagacctaaaacaaaactattcagtccaaataaacagctattcagcttcctgcagaagtgtgcaaaacttgcacagtaaaacatgttttattttactggcatggtaaaggcatcttgtgggtgctgtgctgaagaaaaaatatacacagtaagtcatcactgaatgcaaatgatacgttcttggaaacaataactttaagtgaaatgacatataatgaaaccattttttttctcatcagtgttataaggtaacaacattgattgaaatgatgttttattcgaggacctgctgaacatcaatcacttcatcacaccatacatagactggaataaaataacataaataatttagtcttttcttcttgttgcttgaattaagaaaggatgtaacattaaagttaatattttaaaattttaattaaaacatatctagggtcccggcccacgagtccacgtttgctgcatcacaggcactgaccattgccctgggcaagcattttcggagcatcacaaagcaaatcctttcttcttcttttatggcaggggctcttgatgccactgtgtcacatatgtttccaattaatctcctgctaggctatctgattgaattacacaatcactggaatgttttaaaggcttaactaatttgaagcatagccataggttaaacactgttgaaccatcacactcaaaatatatgtttaacataaacaaatcatttcacagatacaagcatggctaatggggtaccataataaggggaggcaaatgcctttgtcttattttgtccttttacccaaaacattatagtgcctatttttaatactaaaaataaggtacaaggagaattttccatttattacagtatagacaaacaatctgaataattcaagctgtgtttacagagcacaaagtgaggttcaggtttcataaatattcatgattagtgtgggtaagcagtccagataattcagaaactaccctatcccctgacagttcaatttgctagtctagagagaaccaatttaccaataattatgacatctctactttaccacttagtatagaaccatggaggagaaaatgcttccttatttttaagcttaatttagattgttgtttcaatttgattatatggggttatgtggattcagtcatagaagaagattgtgcagtctccccaaattctcggcctatattttaggtatggtgcttctctttccttccattctcttattcttgttttctgcccttggcatgaacagtgtgcatgaaagatggcacttaggtcttagctccctgtgatttcatccaattaggtgactctagcacctagtaaaactgtttctcagaaagtagtggccctctgtactttgggaaatgaatggtgtcctttacaaggacattccagaaaaataggtcaacttataatgtgaagcctggctgagaaggaaataaccaaatgacatctaagacttaggcaaaaagttaaaatacctgtccttctaatgatctctactgcttcttcttttaataaatgtctttagtagctagagaacagttacacaagagaaaggaccaacgagaaatcattggtgagaaataatcaagggaaaggaattttataaaatggtaattaaaaataagaactatgaatgtagttctcagattcaaaccttgtgttatactttaagcatatcaatgaacagtgatctcagataaaaatattgattttctagaaggcttcaatcttacagtgcttttttcccaaagccttgcaagtttcacaagtatcttttgtgttttattcagtatctactgagaggctgttgccacatagcagagagctggatggtctgatactttggggtgggtcagagttttcaaagaacttcccatctaaggaggcagcaaagctgacagaaatgcagggaccacatcaggccttcacctgtctgtttccacaattgagtgacagaaatctgctattttcttccaggagcaagtctggctgagcctttaatatccatttccttaccacaagaaattgtgtctgggcttcatgtcttaagcaatgactacaacagagctccttagcagatctgtgaggatatcagttttatttttacaaaatccagaatttttgttggaagttagcaatgatagaggagtgactgtggaacagggggctaggtggcaaaaggaggtgcaggaaggaaaaaggtgaagaccactgggaaagtaaactagagtggtgcatcctagcctttgaattactttggcaactatttatttatatgtctgtttctatgaatggaaagttccttgaggacagggactctgtcttatttgtatttgcaatcattgcatctagtatagagatgtggaatactcccactcttctgcttacctttcctctcattattgttctctctctcctccccaagggcagaggagttgctcatgtatttagtctgagtttacagtattgactagaccatatcgatcagcaggtaaggtcactgatcatactcatctatgggataggaagctaaatgaaccaagaacagtcagatctaataggctacgagtgactaggagtcaatggcctggagcctggtagataaatattttaaacaaggcatcacgattatgtttgctggatatggacctctggtcaggtacacagaaccactgactaaattatattctgactgtatagattctctgttatcatatggaagaatcaactatgaaaatacatttttctaattcttggattttgtgctagtatacatatagatttcagaaaaaaatggtttgccaaggtttcaattcattaattaatatgtgtatgaagagcctattacattcattcatttactcttttatctgtgctaagcagaattgaatgatctacatactctgcaatgctctgccaacacgtcaagctataatctgttactaattgtcagatagaactggcttcatgggtgtgcaatctgtgcaggcacacaatgccccacactcaaaatgatctacacttgatacaatgctctgctgtcaatatccagaacttcttataatttttcacaagggaacttgtattttccgctggatcccacaaattatgtaactggtcccactctcagtgtcaggatacaaagatatcaggtaagattgttggaatcccaatggactgcagtccaaacgttctttaaaaagccagtgggtaggccgggctcggtagcttaattctgtaatcccagcactttgggaggccaaagcgggcagatcacgaggtaaagagttcgagaccagcctgaccaacatgatgaaacgccccctctactaaaaatacaaaatttagccaggcgtggtggtgtacacctgtaatcccagctactcgggaggctgaggcaggagaattgcttgaacctgggaggcggaggttgcagtgagccaagatctcaccattgcactccaccctgggcgacagagcgaaactccgtatgaaaaaaaaaaaaaaagacaacaggtaataaggatctagacaagtagcccatgggcatgggcctatctcagatctcagaagtcagaagagaagatacagacacaagaaaaatccaaatcctgaatatataatattggagtctttaaaaatttaggtagttaatttgttaattagctagatttaatcattccacagtgtatacatacttgaagacatcatgttgtacctgataaatacatgaattttatctgttgacttaaacaataaaacaaaaaataactttcatcccttaaacaataaaaatccaaaaggaatgtggatccatgttaattaagaaggcatggtctccgaagcagttccctgccttcacttttatttatttttaaattttattatgtaaaattttagatattataaatgtgtataaataataatataattaacctccctatatttatcatacagctccaacagttgtcaatattttgttaatcatgtttcattcatttctctatttttgctaaagtgttttaattaaaacccctatattcacccataaatacttcaatgtgcaagtccaaaagatattcttttttaaatacagcctcaatattattgttatacctaacaaaagtttaaaaaaattaatgttcagtttatgttcaaatttctcaaagatgcctttctatagttactttgttaaatttgaatcctaacaaggtttgcatttgtttggtattgtcacttaactttcttttaaactattataattccccttatctccatttttttcatgctataaatttgtagaaatagctgggttatttgctttgtgtaattacccacattcagaatttgcctaattgcatcttcacaaggttgctgctctagccccagaatttgtgtgataattggttttagatttaggggatggattagatttggtttaatttgggggcaagaaaactgcataaatggtgctgcatattttcttttatttctccagctttatttaggtataattgaaaaataaaaactgtgtacatataaggtatatgtgtacattgtagagatttacccctgtgttttcttccagtgattttacagtttcaggtctaatatttaagagcttaatccattttgagttgatttttgcatatgttgtgagataaagatacagtatcattcttctgcatacggatatccaattttaccaacattatttatttaagagattgtcctttttctcattttgtgctcttggcacctttgtcgaaaaccaaatgactataaatgggtgggtttatttctggaatttctgtcttgttccattggtcaatgtgcctgtttttatgccagcatcatgctgttttaataactacatctttgtaatatattttgaagtcaggtagtgtgatgcctctggctctcttttttttgttcaagattatttgtctattcaggttcttttgttgttccgtacacattttagaattgtttttctatttccgtgaaaaatgctactggaatttttataggaattatactgaatctgcagataactttgggtaatatggatatttaaacaatattaattcttctaaacaattaatacagaatatttttccatttatttgtgtcttcttccctttcttttatcaatgtcttctagtttttggtatacacatcctttacttccttggttaaattcactcaagtattttaatttttttgatattattgtaaatgggattattttctttttttttaaatagttaattgttggtttgtagaaatgctactgatttttgtaggttgatttttttaccctgcaactttactgaattctattatcagttctaatagtaattttggtggagtctttaagattttctgtgtataagatcatgttgtcagcagagacaatttcacttcttcctttctatttggtagccttttatgtctttttctttcctatttgctctggctaggacaaccagtactacgttgaacagtggacctccttgtcttgtttcagatcttagaataaaagcttttaaatttttaatttgagtgtaatgttaaccatggctcatcatatatgggctttatggtatttatgtaaatttcttctcttgctaatttgctaatttgttgacagctattgtcacaaaaggatattggattttgttaaattcttcttttccatgtgggttttgtccttcattttgttaatatgatgtatgacatttatttatttgcatatgttgaaccatccttgtatcctagggataaatcccacctgattatggtgaaagatcctttgaattcagtttgctggggttttttttaaggatttttatagctatgttcattagggaaattggtctgtagtcttctggagtttttgcctggctttggcatcaggctaatgctggcctcctaaaatgaacttagaagtgttaatgcttctccaagtttttggaagagtatgagaaggattggttctttaaatatttgatagaattcagctaagatgccatcaggtgctgggcttttctttgatagggaactttattattgattcaatctctttcttcatttttggtgtgttcaggttttctatttcttcatgattcggtcttgatacgtcatatgtttctaggaatttattaatttatgttatccaatctttggcatatacttgttcatagtagtttttaatgattatttgtatttctgtggcaccaattgtagtatctcctctttcatttctgattttgtttatttgagtattctttctgaaggatagctttgttaagtgtagtattcttggttgcaaacattttctttcctttcagcagtttggtatatatcatctcactctctcctagcctgtaagatttctgctgagaaattcaccgataatgctatagtggttcccttgtatggagcgtggggcctggagacttggggaccagcctggaatctggtgcttcaggggctggccagacacaggggtgggtctaaagcctgggtttgtcaagtccagtctgcagtccaggtacactggggctggtctgaagcccaagtctgcaggagttggcctggtgctggggttcacagaggatggcctggtgttgaggttcatgcagtcaggtgttcattttactttccttttaatatattgaggctgtctctcccccagttgcactgtgtggacttgggaaagcggtgacattcctaaagtgaaattatcctttctatcttcttcaatgcatcttttcttatttctgtgctatactcaggtgatgaaatcttagaccctaccagagggtctcaaattggcttcagtggtttagcagtgaagtaactcacataacttcaactcacaatgcattgtgctattatatggctgaacctaactgcaaacgagtgagaatgtttgacccacctataagctcagaagaggagaattggatatgtatgagcactagaagtctccatcataaaaagataatttaagctgagctttgaagcatattagacaacactggggaaccattagagaaggatttggaaacaattgaaggtatgcagagtcatctctgtaaaaacactaaggttggagtgggataaacataagcaagagagtttgtttctaactagctgtgtcattttgggtcaatcacttcacctctttgaaccatattttctctttgaaaactaacttttaaaaacaaatgttattcaaatatttcttgagcagctaaccacttgtttaaagcaaatgaaatcttgtgtatgaccccaattcacagagcaaatatatgtatggctgctctgggtgaagtatggaggactgagaactcagactccccttttccccacaatacctatcagtggctcttgaggcagcaccactaaaaaaattaatttctcgtacattgtaacttatatttcttgatttattgacttctaatgcttaatggtcatggcaagggtgtctgagagacatattttaagacttcatgtcaagaactcaaatcactattagctagatatgggagtagaacacagaaaattcagcctataactataaaaacaatttgaatactgccttctgagactctttggaatcatggttatttgcatgatgattatccaatatcctatatattcatatgtggttatctgtgcacacatgcataaatagttaacatggtggtgagaatgctgctgccactgttgtttttgctcttaaacattttggaaccttatccaaaagggaaggtgaatttttataaagcacattttcaaactgcagagggaaatgttttcagctgctcagaggaagatatttgtgccaatatgaaaattaatcaaatgaagccaatttattttatttataccttttttacttccacaagacaaaaggtgatggtgaaatgccaatttcccaaggctttgtctacactgaagaaaagagtatgaagcactgaagtaatctgataataagaaagggtggtagggaagccctgtgagattctacatctcatgtagaagatttcctctgagctaagactatccaagagcattgggtcagttttcctgggctattttgaaatcaatttaagaatagaattttgtttatacaactaatgtactacttactccattctcaggagttattccttatgtacctaatgaataaaagagttgtggagaattttttttaaaaatcttgttttcatctgttgttttctgcagattctttaaggacaaaacaaaacataatgactaaatgatgttgtcctacatcaacaagggtttcctaataaataaacattcaatatataataattaatgttttattattttgtgacacattttgaatacagtaaatggcatttcagtagaaattcagattattggtgtgagaattgataagcaataagtatttatttatagaccaatttttggtataggctattatcgttattattattattatccatactcatccttgttgttgaagaaagctcttacaatataattaagcagctctgggagccagaactatttcttgaaaattccttgatgttatcagattaaggtgcatgacaaaaatgctggtagatgttatccttagtcattttgaacatttcctattgtcccatcctctttctgaactaccagagtattttctctgtataagacaaaatcaggtacagtaaaagaaaaaattctggcaataggaagaaagagctaatgttctttcttctctttccctatttctaagaacaaacgacagcttggagtatgtaacaaactgatacatatgaactgcaaatttccctttgaccacagaatgaggcaaggattaaacatttgcctagctcattaactatggagtaaaaaggtttgaatgggaatataaaaaaacgcatttgcaaaacttcaccgcctatcaggaggccagcttcagaatagctatttcttccaaagtaaacatttcctttttaatttctttgaattgctcttagtttttcttaaatttcacctcttgattcaaggttttgcatttttagtagtcctctccatctatctgcacaaaagttaaagaatttctaagattatagaatttttttctaaattatacttcattagcattagaagatgttcttacaaatttatctttcaatcatataccagattttatttcacagtactttagatttcatttctctttgctgtaaagtccctagtcttgttcgataaaataaccatggggattttattcattttaaagacaattgtatagggctacgttatcacatttaagtaaatgagatttacatttttacattatttcaaatgaaaagaagcgaatgtctttaaattattaaatcttttgtcaaaaatgctttaaaattctgttttatttatcagagatttttaattaaagctatttcttagaaaatgaattccttatgaagaaaacattgaattctccttttatctatacattaaacagcttatgcattttttattcctttaattttagatgccaatattttacctcttgggtactttctgtgtagaagattcataacaagaacaatacttattctgcaattctttatataaaggtgagtaactactcaaaaatgattacaggctaacaatcaaagtctaatacaagttgttgtgctacaaactggataatcacatattttggcaggccatgcatggccaagtatttttgtaatcttgatgaagcaataagaacactaaagcatgtaactgtggcatagcaaaaattgatgcatataacaaagttagacctttgaatattgacaagcccattttctagcttgatggagagaaataagctcctgcatccacatggttgatcatctaacttctggaaaggatcaagaggtttgttttctcattgatttctatcatttgtatagtttttatgttgctgatttggtagaaaatcaaatagaaagcaccttaagccaagttgtttttgccaatctttgaacacaggtcagaatttatagtgtagcctagctcacttatatagtgaagtgtcatagtaaacaacaattaataattcctttcttctcagaaatgtagggaaatggaacaagattacaaccacatggtgtaaattggcttgttgatgtgcacttgcatgggtatggctgggatatcagagcctatgacagttgttttatagtgtcaccttaaagcctaatacatattgattcacagatagtaattttaagtttcttttcacagttgagaatatgaccttgcatattaaaacccttaaatcaccttacctttccttagataacctgccccttctccacaaaaccaaagattcttatctcctaattcctaggtaacaggaattctcttccattggaaataaatactggtacttatgaacagtaaagatttgcatttgtttgggcacctattttaataagctattttatgagaagaagagatgaataatattataactattttataagaagaagagatgaataatctttggatgtgtgcttacaatgtaccggttattaatctatacatatttctataaacaatctccattttaattctcaaaatacccttcaaagtaaacattccaatacccaatctctaggtgagtaaactgaggcttagataatcataacactagtcaacagttattgcgtacttgctatgcaatgggcactgtgctaagtgctttacatttacgtcaatgctaagtgtacaatgaatcattacaactctaggaaggaggtgtcattattttacccattttaaagatgcaaacactgtggcttaaaaaggttaaggaactttcccaagttaagatgtggtgtgatgtgttgctgcaacagcttcattctaaaataaatattccaagaggcctagagtcttcaggggaagaaaaattgttctcaagttagaagttttccattattaataaagtaataagaccaggaaggatttgaaatcttttactactgccactgaagaggctggggaagtaaagtataggaaggcttcctcttaccaggcactaggatcaatgctttacatgttgttttagccactgttccacttttgagaaagacagcatgatctcattctacaaaggaagaagctaggtgtcagaaggtttaagaaagtggcccagggttttacagttaaaaaacgtcagcctggactaagaggcaaagcacatctgcagttgtggtgagatggcgtgaattgggataagtacagatcatgaggattgaaagaactgcccagagtttagggcgttctgagtctcaaacactgtcatggccttaccatactgtcagacttccttaagtagctgtacattcctctcttgaaaactccagctgggaactgttttaggtggggcagccctgctaataacaaaattcttcatccactcaaagcaaccagcatggtgcatgtggcccagttctgcttctcagtctcagaatcacagaatctgctgattattcacctcaccttacatctcagaaacttgccagagccaagctgagctacctttatgtgtgattctgtcttggatcgtgccttacccagtactcctgacttcttgcactggatgttacacagtgatccagcttcctctgaccttcagaaaatccatatacaagatatacaaactctctgaatcttctttttctgcttagaggttaaaattatattgcttacccaggcacggtggctcgcacctgtaatcccagcactttgggaggctgagggaggcagatcacctgaggtcaggagttcgagaccagcctgtccaacatggtgaaacctcatctctactaaaaatacaaaaaaaaaaaaaaatagcctggtgtggtgtcaggtacctgtaattccagctacttgggaggctgaggcaggagaatcacttgaacccaggaggtggaagttgcagtaaaccgagatagtgccgctgcactccagtctaggtgttaagagtgaaattccatctcaaaaaagaaagaaaaatggtattgcctacatcactgcatagagataaattctatacctatgtgaaagtactttgaaaagagttcaagtgctaaatacacctcactcactatcaccaatattccacatcacatggcaatactgctagaaacaggagcaatgacaggtatggaatgtaccagttaagtgagggaaaaacagaactaatgtttattgaatggctcagtactgggggcttcccatgctctagggatgtagagacaatcccaatcttcaataaaagttaagttaatacatcattgcaattcagaaaataagctctaatagatacacacaatggaactagtaacagttatgtactccccccgactcctcccatccctgtagtaccatggcctagctagtagtagccatattcatacagtaaaatccccctatttttaattggtccaaaggtgggggcctattctaagctgaatcaattagagttgctcctttggaacttggtttctcattttttgcaggttgattcattgcaagatcatatttacaacacttactagcttgtcactgcacttgtcagagatcccaacctctgctccaagaccccttcccattgtttgtggcagcacctggagaaggcttccatgtgatcagggacagttgtgctcttttaactgtacataggctttcttgtagcagttgtctcctggaaggtcatcccagggaggcccttttcttctcccgctgctgtccttgcctctggagtatgctcctatcagggtacaatgcccgagggcccccaaggctgtaaatcctcccacattgtacaacatacagcataccctcaaggcctcactgaactcgagaaagcctgagttctgcttagatggataacaaatctcctttttaaaatagaggttggatataattttgaagtgtggggagttttttgaataccaattgacatgtaaaaaggcatccacaaatttagtggcttgaaataacaactatttatcatttcttaatattctgtgggtcagaaattaaggcatggcaaatgccttaatggacagttcttttgctccatatgatgttggctgggatcacttatgtgagttcattcagctggatgcacagctggaactggaatatccaaggtgggtcactcattctccagggcttctttcaatgtgacctccacttattcactcttctagaatgggcttcctcacaacatggtggctagtgtccaagatggagttttccaagagggagactgcagaagctgatatacttcttaaagactaggcttaggaggcccagaatgccattttcaccatgttcttttgatcaaagcagatcacaaggccagctaatttcaaaggatagggaaaaagactgcacttcttaatgtgaggagtatctggtatgtgcatctaggaagggaagaatggttgatggccatatttggatgctactactgtaatgaacagacgtcatgtttacctctccatcactcttttcctcctctcactgcccatggaggtactaaacaaacctttctatctgcaagttctcttttccatgcatgtcaatacgtgcaagagacaatcagtgtatgtgtgtctgatatagatctaatcaatgtagtgatgttaaaaactcccgtattcagcacacatggctaaaaatttgatctaagttttgttgtggcaggtactgccaactaagtatttacattcgttattccattaaagtttcttagataaaatgagagacatattattgtcaccattttatacataaggacaccgactcagcaaggtaaataatgtttccaaagtcacactgctgataaataagtgagctgcaacctgaccccttgtctatctagtgagcccatgctaatgacattacacctcactatctctcttcagtctcatcggtataattaagaaaatggttcttcattcatgaaatacatgcagattttttagaatagaaaacattttcctttaatgttatttttaagatagctccttttgaatgagttttggccattgtgaatctatggctttacctctgaaacagaaaaacattaaagaataatataaaacttttattttagtcaaattaatcccctatagtcatttctataccatggagtattgaattaataaaatattgatttttcagaatatatcactgtatagacagactttagctaagcagtataaacaaaatttcatggtttaacaccaacatttattgaggacctacaatattcttagcatgctgataggtatcaagggatatgaaatacatacaggtttttgccctatagaagcttttaatctagtttaagaaaagttatgatcatataaaattaaatgagatggagattaaaaaatactcgagtttacagaaagtctagatctctgagttctgggagggtcaagaaaagagaggactggtagactgggacttttagaatagaaagggtcaagaagtgcaaataaagtggtcaagagaagatagaatccaaaacatagccagaagctcatagagtagtttgaataaatactttcaatgaaaaaaagcagtatggtgggatgtagggggaggatgttgtttaaattagccagtgtagttggatagttctcagaacttcagggactgctattaacacagcagagttttaatacaacaaatgcaagtaggtgctaaaaattaccccccagtttaaatgtctggacaatctataggcattatctatttatctggaccctccaaatgataacaaagacttgccatcagctctttttctagattaaacagtggcagacaggtttgtacctttaggaagaaaacatgggaatcgggcatggggtttggggaagaacattccattttacacactaacgtcactccttaccttaaccatttctggctcccagttaggagagctttctgacaatgaactggacaccatcttgaggagtttatacatggaactcttaggatttaaatttctgaattgggtggtagtggtgatacatacttttcatattcatattcagtaaataatatgatactacttttgcaagcaatagcatgaaggtaatgatgtaatttagtaagaaccagcaagaaatcaaaaccgtagaaattagtttcctcatctgtaaaatgaaatggttggaaaaggtgatcgtcaaggtctcttcctactttattaagatgctgtgattctaagatgctattctgtatataaacaagattattaatttgaactcacaggacttattttaaaacatgtatcgtaatatgggcatatttcaaattttggcagattcctgtagtttgtgttatctgatttcacattgtactattattgttatagctgaacactagaataatttcagtttaccaaatgctctggactctcatgatttaatatggcatataaacataagatgactgtgattactttgaatgaatgaacaaatcagcactcatattcttaatcagaatatagacttcacaaaattattctgacatcttactccaccctgatgctgtagacattccgaattaataactgcaataaacatgttcaatccgttatatgggtcagttacaaatgtaatgaatgtattgtaaaacacattttaatgtgaagacctcagttctcatgtgatctgtattctcttcctcctatttcctgaagtgaagattttaaatctactacctaatacatataatcataaaatgtagaaatgaattaaataaattgacctccatctaattttgtgtatctccatggcagttccattttttaaatttcattttttcatgacaataagtaaaacacattcagaaactaataaatatgataaaataatttctgaacttttatagaagaaaactaaacattgctgaccaaatacttaatgccttttgcaatctactcccaagatgtgctttaaacttctatttatataactcctccatattccatatgtatgtttcttgtgtatcacttggaattacacgccttcatgatgtttgttcccgcctctctaaattaattctgtctttttgtctccatttttctttacttatgcttctacgatcgtacctactattgtttggcacattagacttaattctgtgacctgcgtttgatccagccatgtggactatcacaatcaatattttccagactctgctccagacaatgagtatagcatctccatcatccctcgaactaccactattttggggagctcctaagagatgtctcatgtgagattatggatataatttttttttcagttttttcactatacttttttatttttatgacatgctataaatcgcttccagtgtaattctatctagaatttaaaaggttatttaattatttccatgtttaaaatttaaatttttgactacctgtagactacaaccacattccttagtatggtattccatgacctggcctctttttaattttctaattttacctctgaacattctgcaccttgaaatttatgctctagaaatatctactatcagcttgttctctcacatagcatatgcttctatcatatgtgtcattatttatgttgcttcaagcgcataaatacataaataatgacacattacataatgtattatgtgtcattatttatgtgcttgaaatgtctttcctactcttctttaactggttcatctcctcctcatccattggaattcagcatacagataatgtcttacaaaacatcttgtcttaaacccctaaatgatctctaggccttgcccatgtactacaaacttaaaacaacaataataatagcagtagtgagcacttgttaaacatttagttctaggtatggttctacattctatacttgggttatttcttctaattctgtcaacagccacatccggtagatacaactattattctcattttacaaaggagacagagagagctcacattacttttctaagtctcatagctaataagtggaagaacccattgcagcctgctttcattttacaatggcactaatcactttgtaatgaagtggtcagtatatgagtttgtcctctgtgccacactcttcttcttcgactggattctaaccagcacactggttagaaatataatattagaatttagaaaaaaagctccaggcagtggacttaaactcaagaattgtatattgcagttgatgattaaagctaagtgtctgttgacatcactaaatataatttttagagtaaacagataaaagaattgcagatggcatcttggagaaaaacaaatttaaggggcagtcagaagaacagaaaccaatcagagaaaagaagaaagaatttacacagaggtaagaatgaggagaaatgtcacaagtcccagggaggacaattaaaataaaacaaaaataatcagcacagtaaaaagttgcagaagtatcagcaatatgagaactaaataaaatgattggatggaagaaagagactacaatgagtggtgggataaatggaaccaaagagtggaagcagaaaatgcagcatgcatgttcatgaattttggcagagaatgaaatttgagaagtgagtaggaggaagagttagggttgaaggaaggagtgggtagttaagtatgtttgtcagtggactgggatgagaaagtcaaggaaagattagagaggtaaaagagagaagggatattaatggatcaaagacctaagaaaagcacggttgaagaaccatcccccttacaaaaagaattaagaaactgtgagttcatttatttcatttaacagccctcccatgggccaggaactggggatacagccgtggtcaaaagaaacaaaatcccttgtctttgtaaatcgtacattctgttgtagattctagtaggaagaaaacactgaaacatacaaagtaaaacatatgaaaacatgcaaaataaaataacatacaaaataaataatgtattatatgattatttctcatgctataaggaaaagtaaagaagtcaaggagggagaaaatataggggtgagaactataatttttaaaagagtggtagagtagcctccataagaaagtgtcatttaagaaaagtctaggaagatggttgtatggcttcctagagcacaccagacagtgcaaataccaagttcaaaggtcctgtcgtcagtgtgccttgggggacttacctgcctcattctatgtctcttggacctgagaagccttttttttttttttttaatcaattgagatagaattccaaagtttattgttacgtaacaatacatacaaatgatatacataatactataccatttgtgtaaaaaatgtaaactgcaaagtactactgtatatctttttttaattttattttattattattatactttaagttttagggtacatgtgcacaatgtgcaggttagttacatatgtatacatgtgccgtgctggtgagctgcacccattaactcgtcatttagcataaggtatatctcctaatgctatccctcccccctcccccctccacaacagtcctcagagtgtggtgttccccttcctgtgtccatgtgttctcattgttcaattcccacctatgagtgagaacatgtggtgtttggttttttgtccttgtgatagtttactgagaatgatgatttccaatttcatccatgtccctacaaaggacatgaactcatcatttgttatggctgcatagtattccatggtgtatatgtgccacattttcttaatccagtctatcattgttgaacatttgggttggttccaagtctttggtattgtgaatagtgccacaataaacatacgtgtgcatgtgtctttatagcagcatgatttatagtcctttgggtatatacccagtaatgggatggctgggtcaaatggtatttctagttctagatccctgaggaatcgccacactgaattccacaatggttgaactagtttacactcccaacaacagtgtaaagtgttcctatttctccacatcctctccagcacctgttgtttcctgactttttaatgattgccattctaactggtgtgagatggtatctcattgtggttttgatttgcatttctctgatggccagtgatggtgagcattttttcatgtgttttttggctgcataaatgtcttcttttgagaagtgtctgttcatgtccgttgcccactttttgatgggattgtttgtttttttcttgtaaatttgtttgaattcattgtagattctggatattagccctttgtcagataagtaggttgtgaaaattttctcccattttgtgggtttcctgttcactctgatggtagtttcttttgctgtgcagaagctgtttagtttaattagatcccatttgtcaattttggcttttgttgccattgcttttggtgttttagacatgaagtccttgcccatgcctatgtcctgaatcgtaatgcctaggttttcttctagggtttttatggtaataaactagaaaatctagaagaaatggataaattcctcgacacatacaccctcccaagactaaaccagaaagaagttgaatctctgagtagaccaataacaggctctgaaattgtggcaataatcaatagcttaccaaccaaaaagagtccaggaccagatggattcacagccgaattctaccagaggtacaaggaggaactggtaccaattcttctgaagctattccaatcaatagaaaaagagggaatcctccctaactcattttatgaggccagcatcatcctgataccaaagccgggcagagacacaaccaaaaaagagaattttagaccaatatccttgatgaacattgatgcaaaaatcctcaataaaatactggcaaacagaatccagcagcacatcaaaaagcttatccaccatgatcaagtgggcttcatccctgggatgcaaggctggttcaatatatgcaaatcaataaatgtaatccagcatataaacagaaccaaagacaaaaaccacatgattatctcaatagatgcagataaggcctttgacaaaattcaacaacccttcatgctaaaaactctcaataaattaggtattgatgggacatatctcaaaataataaagagctatctatgacaaacccacagccaatatcatactgaatgggcaaaaactggaagcatcccctttgaaaactggcacaagacagggatgccctctctcaccactcctattcaacatagtgttggaagttctggccagggcaattaggcaggagaaggaaataaagggtattcaattatgaaaagaggaagtcaaattgtccctgtgtgcagatgacatgattgtatatctagaaaaccccattgtctcagcccaaaatctccttaagctgataagcaacttcagcaaagtctcaggatacaaaaatcaatgtgcaaaaatcacaagcattcttatacaccaataacagacagagagccaaatcatgagtgaactcccattcacaattgcttcaaagagaataaaatacctaggaatccaacttacaagggaagtgaaggacctcttcaaggagaactgagaagccttttataagccaatgtgttataccaggttgtcagctgacttgaaggtggactttttgtatacaaatgactcttaagctttcctagtctgtactttgctaagtctctggaactgaaccattgcctcccaaaaagggcaggatccaagcaagtctgaagccctcctcagctcagggccttggcagaacagccaaagggaagtgggaagtggttgatgtgttttctgaggtccaaatatctaacaagaggacttacccttgttcctgattcccagttcgttcaaggcaaaaaggaataaaaaaaaagaaaattgtgaagtgtgtcctgggtaggatttaaggtttgggaatattttctaaaaaagaggacactttgctactttgctaattgtaaggtgatagtgcagaaggctaaagcctggagcctgctgatcatgatacaagggttgcacagatgcagtggcattttcttgaaattgtccctaattctgttttaggaatcttcagtacaaggttattctatgtgcagagccaggtgccactgggtactatagtccagacagttatcctacaaactgcattgaagaaaagaggccattatttgtcttgtctcaaggcaaatcaaagatgatccttcatccaaggactgaccccttttcaaagaagaggttccagaatctgtctgatgtattttctcttttggacaactatacttgagcaggctctggatgtggactctggaaacagcttgctgactgaaattgaaccagaatacaagcccccaagaaaaatactgctttctcttgcaatttaaggcctctcaaaaggaatctgccctcagacacctaggatgcagggaaaaaatggatcagaagaaaattttgttttacaaaataaggttttcccatatcaacagataaatggataaagaatatgtggtccatatacacaatggagtactattcagtcattaaaaaaaagaatgagatcctgtcatttgcagtcactctccattatctttatgccttctccccacaacattcttctttataccctggcaactagaaatctactttctgtttccacagatttgcctattctgaaatttcatataaatggtatcatgccatatatggacctttgtgactggcttctttcagttactataatatttacaaggtgcatccttgtagtatatgtcagtacttcattgtcagatgaaatttcatcatatgcatataccatattttgcttattaattgccctgtttgttgatggacatttgggttgtctatttggctcttataaataatgcctgtatgaatatttgtgtatgcacatgttttcatttctcttggatagatatctaggaatgtaattgctgggtgatataataaatctatgtttaacattttgaggaacttacaaactgtttcccaaagttctgcctcattctttatctttcctctccttctgaaactaagcagatgcaagaccttactctgtcttccatgactcttcgctctttttctcattttccatatctttagctctctttaatgactttagggtaattccttctggtctatcacccagttctcttattctttctttaatggtgtctaatttgatgccatctattgaacttctaagtcaaattacaattttttcaacttcttatattccattcatatgtttttaaaactgccttagtatttttgataatctcttcatgtttccatttcacttcttaattttgaaacatgttgtttgcttattttgtgttttgaatctgattattttaatattgacatatttttccagatctgattcagtggtttcttgccttgttgacttactgatagtgatttgtttcttaaaatgttctgtgatttttatattggtatcatattccttggaattttactatgagaattctttaagccctatatttgaagtttagttccctgaagagaatttgtgtttgcttcttctcgacgcttaccattttaagcttagttttcttctagagagttctcatacatgtagtgtaaattttttgctacaaacctcacaacatgtgtatttctttagttctgggaagttcttggccattattgacttaaatatttccttttccttctttactttctgtcctctgaaattttaaggtttggacctttcagtaatctcttacatgtatttttatttttctttaatatttcaccttccattgtttttgtctcatgacttcatttaaagttgaaatattttattatttattgaatattatttcagtaattttatattatacatttatagatatacatgtatattcctattttttcatgattaattcatcttgttttatgaaaatgatttacttctctatctctctgactatatgaagcatacttctctgaagtttcttctaattgttctattaataccctgctgtgtatgttaattctttcattttgggggatttttatcactctctcacagtgttggccttcctgaaaggttaactgatactttattacactgtcaccttttgtgataaatatctcttttaaacttctcagattttgttatatgcctgtttggggaaggcctttgcctatggttatactctttcattgctagttcttcatagctgctttccttttttaggtacatattaatctgttaactcttaagcaagcgttccccttattgttttcaaatatatctgtgtatgtattagttcacttttcaatatatgtcttatgacttgttggataatagactaaatttaccatattttcaacataccatctaaaaccaaatgtttcaacaggtgttgaagtttggtagaaagtgacttttcattaggaattgttagaatttaatttttaagagtctcaaatattgacaattctcctttttaaaaaactatttttaattattatggatacagaatagttttacatattttggggtcacatctgatattttgatacaagcatacaatgtgcaatgatcaaatcagggtaattaacatatccatcacctcaaacatttatcatttctttttgttagaaacattctaaatctattcttttagttattttgaaatatactataaattattgttaactatagttgtcctattttgctaccaaatattagatattattccttctatctaattgtgtatttctactttttaaccatcccctctttatccctccctccccactacccttcccagtctctggtaatcatcattctactgtctatataaatgagttcaattttattttttagctcctacattttagtgagaacatgcactatttgtctttttgtgcctggcttatttcacttaacataatgtcctccagttccatctatggtgttgcaaataacaggatttcattcttttcattgctgagtaatattctattttatgtatctatctcattttctttaaccattcatctgttgatggacacttaggttgctttgatttcttggctattgtgaatagtgctgcaataaacatgagggttcagatattgctttgacatactgatttcctttcttttggataaacatctagcagtagggttgctggatgataggtgatatagttagactttgtgaccacacccaaatctcatcttgaattataatccccataatccccatagtccccatgtgtcaagggagagaccgggggaagtaattgagtcatgggggcagtttccctcatgctgttctcataatagtgagtgagtactcatgaaatctgatggttttatgagtgtttggtagttcctcctgtggtcattccctctccctctgccttgtgaagaaggtgcttgcctccccatcatcttatgccatgactgtaagtttcctgagtcctcaccagccatataaaactgtgagtaaattaaacctctttcctttataaattacccagtctcaggaagttcttatagcaatgtgagaatgaactaatacaatagggttgttctatttttcattttttgcagaccttccatattgttctccgaggtggctgtaccaatttatattcccatcaacagtgtacaagtgttaccctttctccacatctgagctagcatttgatattgcctgtcttttggataaaagccattttaattggaggacaaatctcactgtagttttaaattgcatttatctggtaattactgatgctgtgccttttttcatataccctctggccatttgtatgtcttcttctgagaaatttctgtgcagttctttggccgaatttttaatcagattattattttttctccaattaagttatttgagcttcttatatattctgaatattaatcttattaatcctttttcagatggatagtttatgaatattttatcccattctgtgggttttctcttcactttgttgatggtttcctttggtgtggagaaaattttttgcttgatatgatccatttgtctatttttactttgaccacctctgcttttgaggtattactcaagatatatttgcctagaccaaagtccaggagtgtttccccaatgttttcttccagtagtttagtaatttcaggtcttgggtttaagtctttaattattttgaattgatttttatatatggtaaaagatggaaatatagtttcattcttctgcatatagatatccagttgtctcagtaccatttactgatgaaagtgtcctttccccggtgtatgttcttggtacctttgtcaaaaatgagttaactgtaagtgtgtaaatgtatttctgggttatctgttctgttccatttgcctatgtgcctgtttttatgccagtatcatgctattttggttaccatagctctgtagtataatttgcagtcaggcaatgagatgcttccgtctttgttctttttgcccagggttgatttggctattctgggtcttttgcgattccacgtaaattttaagattattttttctatttctgtgaagaatgtcattggtattttgataggaattgcatgactattcttaaggagaatcctatttcccgactcctgttttccatgagaatagattttcttcaaacgctcttggcctaccttcacttctttattcactctgaacctgggaaaacatagtaatttattgactggtaagttttgcattggcatttcccttctacttgagagtgagtccatatccagaaagaattatgtctcttctgcccctaataaataagacttaatgtcttatttattttatggagtgatacctacccaacctgcttagacaggaggcgtgctatttacagaacccattcagaaactgcaaaatatcagcaggtgttagcatttcttttttggatatcattgagaacagaaatatagcaaccaccttagtttctttcacctagatatagcacctttcccagaagcagtcagtgctattatgatctttctactaggagaactttttcatattatattaagtgaccactggagataacatccatcttgaggatttagtgtcattctcaagaattataattacttttcatattgtcataatgcataacccagtgtatatcttacaataagatcaaataaatgctttttgcatggatagagggatggattgatgagtaaatatagtggcataaaagcacaaaacatctaagttctacactttgctcatttttctctttagaatatcatgcacatgagatttgtttttttaatctcaaaaactaggataaaaattatctgcattgctatttcagtgttttttggacctaacaagttaaataaattctgagaactttgaaaatatatacaagtggatgtgatgatgtagttttcattcaaattgtgttttgattttgaaaaaaaatcacaacaaaaggaaataattcaacaaactggctatttaaatattactgttattttaccaaatacagcttaagaagaaaccatagaaacagaaaaactgtttgtgtgtttagacaccatcttattgtcctatttattgttaattctcctcatgggaactgttctccacactgctgctgaactaaatgccagataagccatctctctcttccatgtcgttttatttaaatagaagaacaatgtgaagagttatcttttaagaacaacaataaaaagaagcttttttactggcattaatacacaattcatggtggctataggaaatgaatacacaaagcaccatcctggatacttaccacacacattttatttaattctggcaactatatattatttcccagttaaacccagggagcttgaggttcagagaagttaagaaacttccccaaggtcacatagaaatgacaatttataagataggcctgtatttaacaatcataatttaatttaggcaaatacctagaaggtagatgaagaggagagtggaaaaaaaatgacctttcctctccttcctggtcacctcactcctagggtaagccacactgtgcaaagccattttggtccctgatacccaaacattgcttgcttccactgcgagttgctgatgcaggtggtcatcaggggagaactagcagcgtcttcattgggtacaatttcccagaagcagttggtgctattatgatctttctactaggaaggagactttttttccttttttcttttttttatttttttatctgaattccaaagaaggcccttgctgggctgacttggagagcttccaggacgttttcttttttaaaatacacacaaatgtctggagagatacctacaaaacctgcagaagaacacaccctcctggagttcagaagccagtcagatctccaggcttcttttcagatgaagcaaataatgaatccctgcttaatttcaattagtccccatggcataaaaccatgtgaatgattgggaaggaaaaaatactgtctgtgatctgatgccaggagctgcatgctgctcaaataatgtttctttcttatactctctgtactaaaattgtacaaggaagttgtaatattagttaactctaaaggtatttacattattcaactatttcataagaaataaataattcaaatgtcaaaatagtcaactttcttgagagtcactggtgatgaggaaaatctggagaatcacgatcgagggaaacacatttaggattaaggagaaaaaatgttggacccttcctctataaccccgtccaccccttctactatccccctaccctgtccccaagaaagaaagcaaggtaactgcagtatgcagacctcctcatttcctctgtaggagcaagcactgcagcaagctagaaacctcatattcacaaggcaaacaaagcatcattttttaatgactcttctgaatacatttttgcagcagcttccctagacctgcttgtcataatggtttcttcaaacgttttttaaagcctgtgatgttcaaggccctagccttccccctctcttgcttgttttttatgtgtcacagttgtcaactaaaatagagcacctagcctttgtttcaagatggtacctgatcaatatcatcaatccgtctcactccctctccctctctctccctctctctgtctctcacgcactctctctctctctctacagctgtatccatttcctcctggcaaaaagggactttatgaataaatgatactgaaatgctgagggttcagatactaaataatgaatttcaccaccaaaaacacaacaacttctccaatcataaaataccgctccttccatattgattgtgctttggcaactagatgcagtgctaggcttcactctgcaaggtgtttaaaaagaaaaacaggtttacccaggatttatcatgtatggaaaaaatgtaatctctaagtaggctgtctgctaatgtctggcataaggtttcttcataatggttaaccctttttcagggagtggaataatgcaaacagtgcctctctctagatgggaactttgcttcatgggacattacagtaagtgtgtcatctgttctgtgctgttgtgtgggtactagcttataatgataatgcaaatctccttttattatttttttaaagacctgctgtgtgcagggaatagagcatcctgcagcaggacagggactaggtcagagtacctgcagtgcctgttcattctcacgttgctgggtgctgggtgcgcggctcccttactgtcgcatgtagtgggtcaaggtttgggagcatttgttgtctgctcaaatgtgacttgctttcctatttccctcatgaatggtctccgctggcgtatttctgatgtgcaaagaatgccagtgtctgctatctgagagatgactggggtcagggagggtagattcttggcatgtgattggcaaaacctgccttctctcaagttgtaggctaacttttttgactgaaatgttctgtgtctgcctataaatttgctttactgcctattaatgtcagagaagcttcatttttaattagggagaatggagtagactttgttgtatggggaacgctctgcatttcaactacatatgttgatatatacattgtgtagtgcaggttatcagatgatgtcagtcataggaaagaagcgaagtaagttttaagcattgtctatgctgtgtttatttcatgaaattttagcgaagctgaattgctatgataattttaatgtcaaaaagcataaatgttagttttatctttctttctggaacattcatctgcttgtaaaaataaatctttgcttctcttttttaatcgtcaagggacaattaacaaatgtttactaatgtacctatttacctgtatgctaaacatatgctaaagtaaagcaagtatttccattttattttttaaaacttaatttaaagaaaaaatacaggcattaatttagagttactgatgcagtgaaatggaggaatatatttgagctattagccgtttcaatctcctgcctacaaataattgatgagtttctattaaagattgacaagctagcagagtgcaacgcatttttactagaaaatgcagcatgggcagtgaatatgcattattccttttattctagtgctccacattaatagttctggaattaagctttatgtttctatagacctattgattagcatttagctggagatgtacacgtgcctattcatttagctggagatgtacatgtgcctattcgtggttccttctctctatataataacaatttgtagtccctcagccattatttacagcttgttttcatattagtatttcaaatacataaggttttcatttgcctccttatgactagtaaggatttaatgctgtgttgaaaaatcttaacttgccttcctaacaattagggcaccaggtaatgtcacccagagactcatcaggacctatgactggaatagttcctcctcagggtcccagctcagaaagtcaatttcagttgtcagtgtcactgaagggcatgtctcgctttacaggctgtgttttatgtatcttggacatagatctattttaaaagagtacaaagatcagaggtatatcctttacatactttgtttttaattcatgaaacaaaacatttattataaggaaacaaatagtatagaatttaaacatccttttagggtgtgtttgacagtcgttataagtttaccaccatgagggagttcgctggtactggctgaacaatttcatttggtaagatttgacttttttagtgttctggttttaagctgctttccactttgcttcttcatcctgtcctcttgttttgagagcagtgctatcagtagcatccttctgataactaataaaattttattgtcttaatgggacagaaagtacttgtaatattttaaataacagcttttcttaaataaacatacagaaaactagttctttcaattttcctcatcactggtgcctacagaatctgcctataaaatgctttaagagttttacacttataaaatcaccagaaagaaattggatacacatttaatttgcacctcatttcatttgggcttccccattagagccaagtggtgaaaatggggcaattggtattgttttccacaaagtgtactttttaataaaattctggaagacacctcattttacctggggcagttctctgctgtgtttgccctcttaggaaatcatacacaatgacactgaacgtgctagctgacatgttgtctgtaaggacaggttcaataacatgcatatttctttgtaaactaactgcctacaaaaatataacaagcactcaacttaaatcaaaagtttctatacatgaaaactaaaccatacaattattaatttgggtacagctttttaagggactgaaagctgtattttgtgatccatgaccttcttactggaaccccactatgtcttttcatttttttggttatcttggagaattaaaatcaatctgacagtcattttaaataaaaataagcaatataccaccgtccccaaaattccagaaatcccaaaagcatttcttggttttatttttattatgtatggttacatgtggtatgtagcaagggatcataagaccaggtataattattttggtgcacatttgattttctttggtattttgaatatattttctgtagaagaataaataggtgaaaatagttcaccaccatatgatttgttttatccttaggcatggcctgaggttactggaacatttttggttttcagtatcgaaaagtgaaatgcacaacaatgaaaattttattaaaatgtatgttaacccattactgtatgttcattttcaattctttataagaaagcatgatatatcattttgtgtgtgtcattattttttaaaaaagagatgagtcaagtaaaggagcaaatttaatggggaaattttatgggaaacattatacaaatggcagtgtgtgtgattcccattattaaaataatttgtcattgtatgagaaaaggtataaatttcaagaaggagtcttctttagttatctgccctttttttaaatgacagtggcttttgtgcagtaaagacagacacgttctcaggcaaagcccatttcaggacggaatttctgaaagccctattaatgtttcatgctaatcaaggagagtgggaaatagagctgacaggtactttctactctgcttattcctgtcttcctgcattagacattactagctaaaaaagggccaatggggttcttatccaatgcatatactaagaagggcaaaaataaaatgattcttggcttgtttcctgttgttttccatcttggatcagctgataacatttttggtcgtatgagtgcattgattattaatagatttgttttactctaaactgtaacctcaaaagggatttgccacttgaacctagtattgtagtacagtgagccatgctatgtgtgattctataaaagttccatctgggcttcccttgttgaaatattgtacctataagtaatttgagctttttgcttatatctggcttcctaaatgggaatttcctaggtggatatcatagatttagactccaccaagttatctgaggacatagtgtagattggaataaatatactttcgtctttcttcactggctcacttacgcttaacagatttgtcagagctcaatgccagaatgaatatatgccatcgcatatggttgaagaaaagataatttattgattatgttgtgagggtggtggttgtttattgttggctttttaaatttataccagtttaagttgatttaatctattaatttgtatataagatctctgattaaataaaatcaaagcacttttcttttgcaagaaaattttcattatcttaatgattatgtgcttagaaatggtatcttagcataactgactattccacatcttttattcatagaaaaacttttttcaagtgcatttagacatgccaaggactattaccttcaactttagctactgagagcttaccattttctgacacctggtgtctatcttaggaaggtagaaaatgacatatggtggctttaggatacaataaagtattactgtgcaaagttttcaagtagcaagggtgaggtcacaaaaatacactaatggggaacaaactacagttatccataattgagagacataaatatattgagttattttatctctgcttgaaaatagaaactctttcaaggtcagtcacccaagaaaaattacaactcctctaagatttagaaagttatataaaaatgtctgtgacagtacatatataaaaccaaagaagatattttaggttatggagtccatcaatgtgacaaaaaatatttttctaaaactttcttttcttttccctcagtaggatatactttctggtcatgtctgcatactcaggctaacgctgaatacagaaatcaacttgtttaatgtaaaataatgaaagttagctttctattcacacaactttgcatagtcttgacttgaagaaaacagtctgataacaaaaagcttgaaattccagaattaaaagaacatatactgatgcagtagtattgtcactcaaatgatttttgaaggcaattattcttcctttttgggagatagacccttgaaaaatccaacgaaagttagagatcatttcttaaaaaattcatatgctcttaaaattttgcctacagtataagggagtccccagtctacttagcctatccatatgggttcagggcctacaggttaaaaagctcctccattcccgtctacctcattagtattgagagcataatttggccccaaagtcaccttgtacaaccataaaaaccccttttgatcagaataaaggcaaacagaagcctaagcaacatactgcttcacccctttctctttgatcacacctggtcacttggtcatggcttacccttaatggcagtcaagggcattgtttcttccctaataagaggattctcacacaaagcacacagtagttctataaggagcaatccaaaaaaaaaaggactagatctttgaaaatacagatggaacctctttgtttttaacatgaagatctgcattctctagaactttagttcatttttgttcttaaattatgcagaaataacttttattctcttaggttactataagagaatttatctttgactagtccctggatagtggaagctgcaaccgaatgcaaagtttctttggatgatgggcctgccaatgtctaacgtaattttttatcagatttattgtaaatcattactatgatcaaagaaaaaaataaagagacatttggctactgatgttttgttttgctaatgagtcattcaactctgtctagaataccacaatattgtaattgctcatgagtaattacaattaaatgatggtttcattttcaaattgggttccctgtgcttccttggtccagtgctagtcacatagcagatactcaacaaaactcagtgactgagtggtgaattagtgagtgaatgaatgagaactgattctacagctcaaggatcaaatatgagtggataatggaaacttccactgatgaaacaagataaaagtatctacaatgacctacaaaagttatcatagactaatattaatttgctttaaacttgtataaaatttgtaacatatttaaatagccatgcttttttatttagagtctcctcctttgagtttttaagtattcaattcctgcctcatgaggggttgacacttaacaaaatgcaaataaatttttaaaacttacctctagcaaaacttcactggcaatgggtgatataaaaataatttcaatgtcttaaccccaaatttacttgaattgtaaaggcaaatatgacttttttgtaagtttctagaaatgcacatcaaaactactttttttgttctatcgcatgtaattacataattcttattaatatattgacctatattatagcattttgtaattctaagattattgttccttgatccaaatatgtaactgggttagtctttgtaaactacaattttgattaataaataacattaatcagtaatacttaaccaatttttctcctgtattttagaacatcttcaagtttatctctatcagttttctctccctggaggaaagaaacaaccccacaacatactggcttctccattcaactttgcacttatgttttgacttttcttttttgctatttttagggaaatagaagtgtcatattaccttaaatgtacattaaattatttgttttaaaaagacatgatacaatttttttacatgatgtgaattctatttagaattttatatttaggagaaaatgcaaataattgcaaaatggttcacagtgcaagaatatagttaagtttccatcagataaggcttatcagtatttttaagactattgtaagactttgacttctctttcattagctgatgtaaaaccagtgcattccctctgacagtctatacttaaaagctctattttttttaaagatgggagaaaagagagttaattttagtagtttcacccttaccacatgcctgtcatattttagaaaaggaaagccattttcagagcattactgtcatttccaaaccaactaagcacagtctcctagcagccacagactcccctgataaggacaaatagatacataaagacaagcattaagattgcaatgtcacaccccagaagctatttccatgcagtttcccaaaatgggaagaaaaacacctcaatctggttgtcaggtacatatcagaagatataattgcattcttggagactctaggcaaatccagaagcaatgacaaacatatgtgtgataaagaatcagtttccagcaagtacaaactccatcactgttatatcttatggtatgggctatctctaaatgaactgcactgtgagaggtgaaagatgctctctcacctcctgaatgcctggaaacacatagatgtgctgacctgagtcacaggccacatgaccaagagaaggtctctgcagtcccatgactggccaccacaaaagaagatacccctgcttaagcaaacctgcaaagtacattcacctcaggcagaactggaatcaacctgagaacactctaggtaccagaacaagaaacacattttaagatgagttgccatttgggtttgttgggttcaatatctcatagttccttctcccactcatagtttaagaacacctacccatgggacagagagcaaaggtgaaatgacacaaaaagatccatgccccttttcatattcaactctggtagtcaaattcgtgcaagccaatggattagctctcactgttcgggtaattaagatatttgctattcatagttaaaaggagatcagaataatacaatggaacacacagtaaccaatacagtggaaagaagttaaacctggaaagtaatgttaagatgtctatttaaggcactcaaatctggaaaactgtttaagtaactgtaataaatcattaatgagtgagcagtaaaacactgtttaatcattaattaaccatgtattaacagtagaaaatattagtaattcatcctttactgtacctagcgataactataaaattaagtgcttatggattcatgtaattaattatttaatgtattttctaattaagatataatatagttataagaattttgcttctgttaactaccaaaatagcatggtagtttacaggttgattttcaacctaaccttactgccttcatgttttccttattgttaaagtgctattttatacaagtataagtttacttaaatggtaaaatacccctaagatgcaatctgatatggctttcccataacccatttatttttatatatgtcaaaccttatattttttctttttcaaattgaccaaaatgatctttaatctaaaattggctctgatttgactgaaggcaactgcagagcttctaggtaactaattttcctaaaataattgccataaatgttattcccactgtaatataaaagataatcgaaagggcttttgcatgtgtcaactaaagctttcagctaatactgtgctttatctgccgatgaaatgtggctagctcaaccattttttattatatagtacaacatataaaaacaaagatgcaatattttaatttttaaacatttgacatattttaatttttaaacatttgacatcagacattttgattaaaatatgtcatcctgagcaatgaaatttcattctgtttaccattgtaataagaattaccttcaaaggttattatttgggtttactagaaaatgatccagagtaatctattattacataaactaaactagggaagggcttaatattgtttattttttctagttaatattataacaatttttcttaataatatttgtgaaaaacaaaacatattaaattgatgaaatgttatacaatgtgagcgaattggctatctactgtggagtcagaggctcaattgtacattttagtaaaatatcatatgaacattcttaatcaaaagtttacggaaacataggtcagtgtaatgtgggaaattaaaaacaaagtttacagaaataaagattttagttaaccatctgaacaataaaaatgtttgtcttttgggactttaattcagttgtaaagggggtgtaaataagaatagaagcaaatctgaggtactttaggttaaccattgggtgtttaaatgtattgaaggtgaaaaactgtacttacagagccatcaattccagccacaaagcgatggccctgtggtctttgtcattcttgtcattcaatccccatcactatccaatcaggtggtaagcaggggagcctagaccagacagtaaaactcggagcaattggatttgtctatcctaacaaggctgcattcgccttagtgactgccaagtcactaactccacctcttttccccacaggcaaaacattttagaactgtcataaagaaaatgccattgctgggatgtcaaaaattccttttactcctccttgaaattaagttttgtgtatgtgcaagcatacatgaactgactttaataaaagccactctgaggaaaatgtgaaaaaatagaactgcttataatcattaaaacattttgttgtggagacaagaagagcatctggccgtggcagaaataaaagtgtttgttgggaagctaaactactgttcatggttctggaaaataattaatgtggtccagcactgccatggatatcatatgagtgaggtaggcttgctttcatggagcaaaatctccctgtataacgtctcttttccaaggatagcatatttcactatttgccatttaaaccagatcaatagcggtgggagtatcgagctcatgaggccaaagtcacagctatagagaaaaactccattcccagagaagacaactgagtgtacccctatccctgagtggtcctgtcatcagccctaagctaagtagggatgtggaatgccaaccaccagaacaaccatctctgggaaacctgctccagtgcctgccttggaggtttgtcagtgggctccgcctctccatgaggctgaggtcttaaatagtgactgaagtcttcctgaagtaaaacgttagcataataggccgattccacttagcatccaagttatttcaacccagtgcaagggtaatctgacaaaaacacggagttcctcagaacattgcaagggctaaatgacttctatatattgtgaatactgactcaaaagaaaaagcaatatgaaaaggcatttagctttggatatcaagccactagaaaataatatagttagaatttctactccacactttccatgttagcattaaactaagcttcttgaaggccaagtcactgttgttttcatcttagaatcctcagcgcttatcactgtattgactaccttgtagattagcactgtccaatagaaaataatgagtcacatacgtaactttaaattttctaatagtcacatgtaaaaaataaaccagtgaagttaattaataatacaattgacttaacacaatagtccaaataattatcatttcaacacataatcaattgagattttatattaatgagaactctagtgtttatttttcagctacagcatacttcaattcagactagtccaattaaactgcttgagagacacatgtggtcatagtacagcacagctatagatgatcaattcatacatgctataaaaataaaagaaaaataagtgaatgagtaaatgaatgaatgaataaatattaaagtagatataaaaagtaatcactttgagctcactacatagatggagattataaactaccaatgttttatgtatatatagtacataaatatactgtatgtgtgtgcaaatatatatatatatggtatatgtttgttgggtagatgggatgctgcagagcagcatgtcaaattcctaatcaagtgaattttacaatatcttttatttggctaattagcaaatcaaatttttttctaatagctatttgcacttaaattccaaaatattcattaattacaaattttaaaaatctgttgttagaaataaatgccttgtaggccactaggaaaagttgtgctggcctatcctcagcatttaccataatttcaaagtaattctaggtagatctctcatggaaagttgaaactatatttcagagcaatttattctagggcaattatgcaacttgttactttggtctgaatataattgtacgcctggtaataaagtactatgttcccatccaatagtgaagaactcatagatttggaagtggttaatgtcaaacacctgtggccaagcaacatcctctatgttaggttttttctccttagtaacaattgaaagatttataaatgaggaaaaggatatgaaggagaaatttaaaaacatctttaataatatatcttataaaatttactctatataatacaaaattgtatattagataaaattctatgagccattttaaaaggtactactacataaaacattttagaggtagaagaggagaaaaaattttttatttgaagaaaattttattatgacttagaaaatacaaccttttaaaaataaattcataaaatgtttctctctgtaaaaaagttgattttaatccttgtacagtataagtagggaagagtctttcgtattatgtcagtgtaaaggtacttagccagcataggtcaatcattccatttatcatccaaaagcctaaaaaagacttaaatagccctgttgtctttccaccttctattttagtcactaagcatcaccataaatattgaagtatgacgccaaggatctagaaaatcagtagctatacttaagacattattcccacatcattgtattcaactactatacttctcagtaactgtcagaacttcaaaatgatgcattttaaagataagttttcaccgattaatgtattatgttgtaacaaacagatttaatgcctttcggcctaaatcaaacagttctatgaccagttagagtttgctgaattagatacacagccgcttgtttggttcttagattagtaacctaccttcctcagaagcagctattttacttttattaatttatatttagtccccttggcttgagacagagtacaggctaactgtatttccccagagtaaatatagtagttctcatattctcagagttggaggagtttttgtgatttttttccatttccaaatacacaagtcatcttgtgcagtaaagcatgctcgtcaatgcacatgtcagccaactttaaaaagaaaagtctgagaaaaaataaaaagtaaattatttaagtggagttgtagaggaagcttgaaagaattctgtttggaaagtttctttgcttctctctgccaatggaggagcgactgactctggatctctcactagtgagcttctgtcataactagggctgacagttcacattgaaaattctgttttcttccttctcaggaaagcaagtcaaagttaagccaacaaactgttcttggcaagggccttacttttgtttcctcttctttaaattagccatttgggtttcgttcagtatttgtgaatacatttctaggatttggcaccacagatttcagtggatactgagacacttttttaaaaagtggaggccctctgtaatgaaaagtgtggccacatgagtgcagaatttgagatgaagagagaaaaactcaagtatcattgtgtcgaggaaacaacaagaaatcaacaaaccaaaccactgcgaaatatcattaacattcaactacagttgaatttggcagtgaactgttttagggtagcatattccatttgagatgtctgtaaaatatattacagctgagttccattgactttgccacattaacaactatagggaatgaaataatgggtaaaagccgttgtagagctttttgctcttgtgcagaaactgagcaaaaagtgcctgtgactttattttctttcactttcaaagctgttccatcaatgcacggtttgggatcactgtatgaactcttccaaagtatttacagagggtaaaagtatgcttcatcccaggaactacggcaggcatggcttattttatgaaaaccctacttacaaaatgccaaacctaacaaaatagatgaacaagatagggaagagatgatacattcttcaccataacggaagtaattattttacaaaaaaattcactttacatttaggagaatcttctgtatattaaatataaaattatattttcttacagtcagttaccctttaattttgggggaatgttttatttatgctcccactaagttacaggcaattttataaaataccaaattaccaccaattacattacagtcaaggaagtgactagttgtatctatattgtttatgaggtacaaacaggcatgaaagatggataaacatataaagcccctacacatagatttggtgtttgcttaatgcccatatttatatatgttcgccacgtgtacatgtacacatacagtgttgttccactaactgacttatctgtagataatacagtatttgcaagaccagttcattaaggttaatttgttcaaaaatattagaatcattaatttctggcttatagctaatggctgctctcagccagtgtcctgcttcatcattagtgtcactgagattataactcacacccaactgtttttacactatctaatagaatcaattgatgcaatggttgacaagatgctgttttgcattttgtcatcacactaatgtacatggcttaaaggcattggcatccataatatggggcagttttgtaggagactggaataggctgaagctgcaagggccattttcataaaatattaatgaaattgaaaaatacactggggttgaaggcttgtctgctaaatgtaaggtaaaatctattctgctctgctttctgatgactgtaattagcagccctaattaaaaattcaaaccttgtgtatatttgaaagcatgaatcttagctcgcatcatgtttatttcctttacaaagtattttattttacaacactaattgaacaggatccttcctagtccgacagccgcagctggctggagccagtttatgtatccagtctctcaagactacttccttttgtaagtaataaaacatctttaaaaaacatggatatgctctctctgagccattaactctgtgccatccagcaccaggctggtcttctccccacacattgtttttttttttttccttcacttaaatgtgacctctttgaagaggctgcttttttctgatcttcaatatttaatgtggatttacttacattaaatgaccaccttactaaaggagcaaaggctcacttctgacattatttatgaacagcatacgctgtgcaaaaatacggaaggaattgccagggaatacctattagttctggtagaagaatctactttttatcattgttttctaaacttattttcaaatttgtggccagaatgttgacgcctcactggggactgcgcgacagcaagtgaagtccaaactgattagaatcatgttacttagagagaacagagaccagccaggaccagagctagaagtcagtcaaagccagcatctgagtaggtcagacacgttaagacttttttctttcaataacgacaaaaataagttttgtttcaacttatgcctattattgacaaaaagaagaagaagaaaaacaggcacctaattatggttaaaataatctggaaaaggtaacatctatcttttgtttgatctgcgtatcctttcatctctgggtgtcaatttcctcacctgtaaaatgggaatgcttataatgcctttacttagatgttctgtctacctaagagactttttctgaggacacaaacaattagatttacaaaagcactttgacaactcttaacacagcatgcaaataccagggattcattagaaatgtactcattctctacaagtgactcaaactatgaacagaaaatggaaggaaactggtgatcgatactattagaaatgcccttaaagtttgtgcaacccaatttaagtaactcattcttcatttgggctgggattcactggaaatgtgctgagaacaaagaaataagtctggccgggtgcagtggctcacgcctgtaatcccagcactttgggaggctgaggcaggtgaatcatgaggttaagaaatcaagactatcctggccaacttggtgaaaccccatctctactaaaaatacaaaaattagctaagcgtggtggcgtgcccctgtagtcccagctactcaggaggctgaggcaggagaattgcttgatcccgggaggcaggggttgcaatgagctgagatcgtgcctctgtctgcactctagcctggcaacagagtgagactctgtctcaaaaaacaaacaaacaaacaaacaaaaaaaacacacacgcacacacacaagacacaagttctttcttttataccttaatgaagttttggtctgattttcctggagactctatttctaatatgttattggaattcacatgactgaaaaagttgaatattacattgtactgaaatattaaaattgcttctccaccaatacattgctttaaatgattaaatgaataagcaattatgtttgatggtaaaatgttactagcactattaaaaacaaatatttttcaatattgggaattaaacagtttattttgtaccaccacaaactatttagaatatagaatcatctactctttgcctcaggcatgggatctatattccttacacatggagatttcccaccaaaggaggtgaaagtttttccggagtaagaagtattgaacatgaggctattaagaggatatgaggcctgctaatatttggattattgatttttccaagtgataaatgttacatcacccaccccccaccccaaatacgcatttacttcattgaatggagagctgccttcttttctacctgaaaggggagagcagaattaataattttgtatcactagagagaatcagatccaattattttgtgggtagctggcaaatgtgaagaagagaaggctgtagaaaagtgggaggtgagggaaggaggagcagctagacttctaagcctggacagagcctcttgcagaacgcacctcagccccaaaggcatggggtgaatgctgctgtcataaaagatggacaacagaaatcaagggatattgtcaggcatctacatcaccttaggccctcaagagggtgagcagtttccttgctgctgaacagagtgagccaaagaccgtcaagcttctgtgggcaacaccacctagagacatgctcctctcctcctggtgtcctgggaaaatgcgatatccccttcccaggtatacattgaaccaagattcacttcctctcatttccatctctgcctccaaatcattccataggcctggccataaaaatttatcctcggctctgccctccaatagagctgcactctgctgcatctgaaaggtgttgcccaagctgattctcctccaaggagcatccctacctaacctccagtggcattagaaaccctcctgcagaactgctctctgttgctgcactcaattcaccttgggccttctcctgagcagcctgcctggttagcaaacagctgaatatgctgacactggtttgcttctctgagcacagaaggctgaagttcctggagttcagaagctgggtcactcctccctccctgctacctgctaggctccactcttcctgcagagcaggatgctagagggacagtggtaggatgtgtggcaggagttaaaaaaaatttaggaaaagttcattccagaagaagtggagcagcacttagttctggggggcatcgagtgaagtccttccatctggtttccaggttattgagaaggttcagcacgaaagcactctgacaactctaaaatgacatgcaaatactagcgagtcattagaagtgtactcatcttctataagtagctcaaacagtgaacagaaaatgaaagcaaactgctgatcgatactactagaattgccctcaaagttagtgcaacctgatgtctataactcattaattaatttggcctgggattcaggaaaaaaaaaaatcccagaggcagtttcaaaccctgccaatattgccattgaagacttcacacttccctctccagcacttaaaagtataacttctcttctgtctggcaaatgcctaattactttgtgttgcctttggatcagactctaattctttgttataattaggtgagcatctaattacatgaaaagcaactcaagagagctaagctttctattcactttttcaaactgccctgttccaaaaattacctttcttccttctcctcctctttcttctatcaaaatcctacttgtcaggtgaggttgagctccagtggagttaagaaggaagcaagctaactgactgaactaattccttcaagattgtggatgaccttctctgactacttgtggctaggtagaggcatccgcacaaggaaagtgattataagtgactttgggtttgcaccagtttcaccctcatatgaattgacctaactgatcacaggctttgcctctgaggaatctgaataaaatcagaaaacagggctgttagtggaatggaagtttccagagtccctagctgaacttagttcatagctgactcatctctgtgagggatttctccattttgtgtgtctatacactcatgtagcagggttctctgctcatagatgaagactgaggggggcaatattcacaactgtgtgatgaggaagagaaattttcgtttctattagttttgtattggtctatgcagactgagaatttttttgtttatgaatctgcatttggtgattacatattaatgtttattttaagtccattgccggagaaaagagcttacattttatctcttaaaagacatcctgcaggtcaccagtgcatattcaaaagtaaaccaggggtggggtagggcagagtgcataaacaagaaatggatcccacactatcccatataacccccatgaagtcttagaaaggccttcttgaataataaaaaggttaagcatccactctttagattatcttgctgttctgtttatctttccctctttagagcaactcttaggagctcttctcctattatccactggacctattttgtgatccaggaataatgtgtgtgttttacttcattaattcaccctgaccacccacagatgaagaactgctagggtccaggcgggacttgagatgagaggtgcacacacactaaaactcaccagcttgttattgttgtattatttattctctatataagatatttcttctgagatgcctaaagtacttttctacacactaaataaatgattaaccctcagaaccctgctatgaggcaagcagatttgcaaagttgataggacaagaaggataaaactaagccccacatgtggaaaataacaattcatcacacaggtgaggattgcaatgtctggctctaaaggtgtagtgaacaggaaatatcaaccagtaaattgactttgttgaattatgacctcttcctttctctccattcctcccccacacacccatcatatccaaagcactttcacatgtcaattaggttccctgctattgcacaggtaggagagcatatgctaatgtacacataactgcatctcctaaaccttaccattgacctgatgttattgaattgacaatattgtacagggtttgcttaagctaatggactgccataaggctgaagtgatgcttgcactgaagtctagattatcccacagtctaagctctttcttgtggttcagaatgaatttatctcatttgtgaaggaaagcaacatccacctactgtctgtttggccaaagaaatctctgctttctctgagcaaggtataatgaaaacatgcattaaaagatcatctacggtaagagcctagcagagtcactagtggtccaaccaatcatctgtcatttaggatctcagtcataggtccagccatcatcatctcatgcccgaatttctaaaatggctttttttttttttcaaattaagtttagattatccaattactctgactaatactaccagagaaatgtcctggcactaggatttcatgaggcattttgcatttaagtagatcttacttctttgaaatgtttcttgattaatcctacccaccttccgatccatacttcccacctgccccatccctgcaattagaattgactactggtttagcagtggttattttctctctctctctctgtttttttgttttttgtttttgtttttgagatagagtctcgctctgtcaccaggttggagtgcaatggcgtgatctcagctcactgcaacctccgcctccctgttcaagcgattaacttgccattttgtgtgactatacatttgccagctactcgggaggctgagccaccacgccaggctagtttttgtatttttattagagacggggtttctccatgtcggccagggtgatctggaactcctgacctccggtgatccgctcacctcggtttcccaaagtgctgggataacaggcatgagccaccgcacctggcctattttctcttaaaagtcaacgtggctcccctctttcttagagagctttaaactgggctttacattgatggtattctgcatgttttcttcaacattgactcaatttactcaattcaatttgctgcattctgtgtgtgtgtgtgtgtgtgtgtatgtgtgtgtgtgtgtgagagagagagacattagtttaccagtgaaatgccaaaacaaaagaattaatctttgatcatatcactcccttgcataaaactcttaaggggtcctattgaatctagaataaaatttgaatctctgggtcctacatagctcaccaactttgccgttagctgtgcttcccttggaatagtgtcttccagccatcccctcagggcttttgcactatttcttctgcctggaatgctccttgcccattttgaccaagacaaatcctttatatattaagtttcattttctaaaaaaaaaaaaaaaaaaaagaagaagaagaagaaaagaaagaaaaaagaaaagatctcatttccttaaagggacatttcttgacggcccaatcttgaattgtcctcccacttatttattctcatagtaccctgtaattttccttcacaaatgtaacaatgtatatggttatatttattacatgtattggttcaatgtatgatttccccagtagactgtaagttccatctggacagagatctgatctcttttctaagcatttaacacactgcctggcacacattatccctcaataagtgaatgaatggaaaacatagatctgtgattaagatagatctatatttgatttctgatttacttcttagctatgctaccttgaggaagtaatttcatttctgagtctgtttcctcatctataaggtaaagttaatagtatctatttcataggacatttacattgatttaattaggtaatatataacagattttaagcactcaataaatgctagtatactttaggtcaggacttgatttccagaattcttggattgtttttaaagtttattttatccatcaaaactactcaaataattatgaaaaagtgacagctatttcaaataattatgaagaagtcacagctatttcaaatgcaattttactatagacttgaagttatatctgatttatttctgggttccacgaaatattagaaatgaagtctcgcatttaaaaatgggctcttatagagcccattataccatttataatgggtatttagtgaagtaactaattttgtagataagaaaagggagcccagagagagccaggaacttgcttagcgccatgtaagtagtgaaagaaaaaccagaactggacttttatattctgatttcccacctaatgacctaattactaaggcacatcgtctacttttaatcatagatcaaataccacatttaatcacactaacggtaatacatttgatccatgagtcaactatcacttacaatcccaagatttttttctctagacattttagtaaaaagcataggctctagagaaaaaaaaattactcaaatcccacttgtgccatttccaagctgatactggaaaaaatattaatttctcttagcatcggttttctcttatgtaaattgtggataatatattttacttacataattattctaatagctatataagatagtgtctgtgaaacacacaacagttcctagtacgtggtagtattcactagtatagatgactggggattggggtagtgatagtagcaatcatggtagtatttatttttatttggcttgtatttagagctttcttccttcaccaaccaacaataatactttaaaacaaatttatcattttcattttgcatttctttcttatcttacaagattaggagtatcttggatttttcattatccgcttgaccatttggttttgcttacaaaattagtctcccatatttgtgggttctgtatcatattcaaccagccatgaatcaaaatattaaagaataataataaaacaaaaagatccatataaaaatacagtataataactacttccatcacgtttacattgtgtttggtattacaagtaatctagagatgatttaaagtatgtgggaggctatgcataggttatatgcaaatactgtgccattttatataagggacttgagcatcctcagattttggtatccaccagggattctggaacctattccctatgcatactgaggaacaactctatagcaattttgatacttctacaattctgaatttttaaaacatatatgtaaatataaatggatagtaccaataatgtgcagaatgaaaattatcactcaagttgccctcactaatagagtgatcagtttttcttagactgtccctatttactccagttgccctgatgtaattgctgatcaaactcctttcaccctcaaaatgacacagtttctaacaatgacagatcctcctaaatatttcatttcttgctagggggtccagagttgctgacttgatgaagctataactatagttttagtgacaatgttttttaactgcagtttgttttataattttacatttattgattacttgatatgaaggaaagcattcgaataataacaaacatccctttcctagcaaatcacagtgaatccatgaatatttaaagttagaaaccatgtaaattaagggactacacaaggattcttccaaattcaagggaattcactggcaaggacagagtttataaaacatgaattgtacacagcttcttagattcaaacctattaagtaaattaagatgcacttcagtagggttctggaacattcagctccctggctttgggtgtgaatgtttgctctgccccttattagttactgtgtttggggcaagttgggctttacttacttttttttttctttttcttttttttttttttttttgtttgagatgaagtctcactctgtcacccaggctggagtgctgtgtcgcgatctcagctcactgcaacctccgccttccagattcaagcgattccgtttcctcagcctccctagtagctgggattacaggcgtgcaccactacgcctagctaatttttgtattttcagtagagatggggtttcaccatgttggcgaggctggtctcgaaggccttagcctcccaaagtgctgggattacaggtgtgggattacagccactatgcccggctagtatttttttaaaaagtttatctacgaatgtaaacaaaaggagaaagtaggcaataaatcatctgaatgaatacaaaattgctgatttacgtattttcaactttccaaagttctgttcttttacttttaatatgccattcctgcttaggtctgcaactgacttaatctatgtagatacaaattaatctaaaatttcatatacataaattgtatttaaacatatatgtgtgtttgtgtgtatgtgtctacacatatttgtatgtataagtgtatagacatatatcatcagacatattcaaagtttctatcaagagttctcaaatatccctacttagctatctagatagctgttatgtttcaagtattcctaaattgtatttagacaactgataataccatatctataatataaataaatatatttatttatattcctcatatatatgtatatatatgaggaattatatatagaaataaggttggaacaagatggatcaggcaccatctgtgggtgatgcttctgataccccagttgtcctttggcctttggccttccaacttaggacacttatgtgttcctttctcaacagactagttaaggatttaatgtttaatgtttaatatactaattaatgttttgcattacaatccaattccataatttaattgtcaggatattttaaaatttatttttaagctactttattagaatataaatattctaataaatccaactattatgtttttatttaaatttttttctctaaatctgtattatacaacccttacaaagacagctgcagtattagaataaaatatactttttacataaaagaatataaatatccttctttaacatgatgatgtaaaattatatatttggatacttggattcacgctgttctctctttctctagtagtcattgaaatgtattgccatttatttcatcagataaaagcagaaaaaattcaacttttaaatctaaataagtttctgtctgattttatttcagagaattataagccgaattatccactgagatgttaagtaacaattaaaataacatctctaaataaatgatgtagaacaaatattttagatctagaggttaggtcagttacttaaaaagcagagagcgtatgctatgttgaacagtgcaatacaaagaatattagtgaattcagaaggacattatctatgtgttaataacactctatatttatatgtccactcctctgggtttacatgtttcagtttgattcactctgtttctcattttctttcttggatctcccaaggatgaattctgtagcaatgctcccagcacaatgcatcatggtatccattcatctagcactttcctagagtgcattccctaacaatgaacacaaagtgtcactgtgactacatgctaatagtctaaaactccaaaaaactttgcccaaatttggaattcatttacttgcaaatgggtgttctatttgaaacttctgtgattcattttctttaatttaatttggacatgatttgactttttattattcttatgtttatttcctggtcattcatatactctaaggtggtgcttatttattttttttttttttttacttttgatgacaccagaaagacaaaaagcaaaagaacataggttctaaacactttagttttcatgtctgatgacatgtgaattaatgtgcattaaagacagaaactagtctggggttgataatgacctcactgcacacatttcgggaccacaacacaccacatgctatcattgcgctagaaaaagatcttctgctcagaacagaataagaatgcaaattcttaaatacatacaaaaggcaaatgcctatatccagtgacaacggaatccttgaaaacctatcatctttctctgtccttaaaacactgttctatataaaatatctgcttgcaagcagcatctgcttctgaatgtattttccagtagtgtttaaaacatttgtttttgctttattttttctctattttaatattaattttctccatgatttggatatgtaaatttctaaagtaaattatctccaaatagttggtatcatttcagacccacaagcaagtattctcttccgaaacttactacaggtgtccagctcattgaaccaattattttgaccatggattagtgttttctgaaaaacataaaggctaattataatatctgtatttatgtagaaaaactacaaagaaaacactggggcttatattttaagctactttatgtgctgtaacacaagccatgcttgaagcaatatttaaacctgttcttgccttatttcttcatttatttatctgtgacagttttctttataccaatccctttagacagttttctccagcctatcactatcattttctaaatttattatttcctatgattgttttaatacagtgttttatggattcctattgaggtattaggtaacagaagatatgatcatgtgtttaattcatcttcatctgctagtcagcatgtgattttgtagaaaagatactaattaataaacatctgatgagacctcccccatctctacctttgtacctgtgggtaaactatttaaccttgacttatttattttttgaaaaaatgttcatctgcaaggaacagtgtaaaaattagtgacaacaataaacctgttttaaaaagtaacagttattaccaccaaatgttaaatgctaaaatatcatttgtaatgaaataagcaggtaattttcagcatagcatgtcagagaagctctttttctttcctatgaatagtttaaaatatatacctggagcttagtttgacttttcaggaaccatgtgtgatttttttagaatgtacttaaattttcagaggatttatagaaactcagtggctactgttttaggtgtgaatttctgatgtctgggtatatggtaaatagaatgtcataagaatttagataccttatttggaagactggaattttgatttttgagaaggatgatatataacttcattcctttattctataaatattcattaactatttttatgtacaaatgttgtgctaaggcctacaagcacaaaaactcaacttaagtgctctcataagcttatagatctgcaagaagaaacaaatacataagaaaacgctataggtactgttgcagaatctacagtaggacggtggggatatgagtgtgtggttgcctccaacatagcgtaaatgcttcctcagattctctcaacctcatttatctcctagaccttggacagttgcccaacatagctgacatcaaggtcacagactatctgtgggtttatagatcctggtgacagatagtttactgcaagcctggtccacaggctttggctcttccaaacaattttggactagacaaagccccacaccacttccaaagggggccaagtgatacaacaataaaactcagggaagtagacagctcatgaggcaaacagaccaatgggagacaggcctagaataatacactagataaattccttgtagaggactgttctgagtggtggcttttccacgcatcctgtctggaaacctcctgaagcattgtctggccagcaccataacacatcaccttgcatttgcttccatccctctctgattcatttccttttccctcacctttgcctagaaatgtcatttccctataaaggattggcaatgtagtcttgcctcactctctgctatttaggataggctaaaacagtggttaatttgatttgcatgggtaaggacaggggtagattaggaggtggaaggtattgatcaacaaagattgcaaaaggatgtgaaggctacttaaaatatgcaaagaacttttttaaatacttatctaagctctcagaagtcttttacccattataagttacaactttgatcaggagagacagaaaaatctaaaagtgagaaaatagtttaagtccattagtttatcaccccagagatactactactccaccctgagcttaattacatgtaacattttcccctggaagcatattcagtgatctccaatcctttcaccatatgacttattacattttgagagtattatcaatgtctatctttcatcaaattctgcaacttaatttttaatctgggttttgcgctagcccagcattcagagactactaacacagtttaataattgtggaaatacaacacataaatttacaaaaatgtctatatttctgacccttctggcccttcaacttcaagctttacctcttctaatatattctaaatactgctgaccaatgagttttccaatctcctcatctgacttctctcattttcttcaaaattttccctaaacttcttgctctttatagtaaatacaaatcattcacatgaagtttgaagtttctttcccgcacccttccttgtatgtttcaagtattatgtctgtttgcattgcttcagtgccctattgattctggagccagctcgctgttttatgctattaaggcatttccttcacttcagtcaacaacccatccttccttaagcagtaagacacaacaagaacgaaagtactttcacccctttataagcttccctacatcaaaaccagcacaaataaaatgtctagttccccaaagggaacatggcaattgcctcacctccaacattcttttaagaatacacccattccacatgagagaaatgtgtttggctccaaaccggaattcagagtctgtactggtgaagtacaaagttgtcctatttctggacaaaataaattcattgatcaaagcagcaattcactctgttcttccaaatatggttctcgtttccatttagagtagccataacatttattattttattgtaaaatgttattacttttcattcttaaacatgtaagccagtatacttttgagaataaaacaagctacaggtagtaggtataaaccagaactgtttcagacaactagggatgagcaatgttatgagtcttcattttaaatgatggagatcaaggaattactccttgaaatctttgtagttttcagacgcttggtcaaggttactagttttaaggatttcagatgaaaaaataaatgaagacatgcaaatgaaacctgaacatagtgctaaagagtgaagacactgtttttattgcatcctggctctgcttgctatgtgagcttgggcaagtcgtttaatctctctgtatctcagttttctgtaaagtgggactaaatatggtgtctgtctcatagtgctgtgggggttaaatgagttaagcacttaaaacaatttcttgcatatagcactatgtaagagctagctactaccattactaatagagctagttcttatacagtgctatatataacagttccttgcatattccactatataagagctagctctactagtaatggtagtgaatatgcaaggaattgttatatatagcactatataagagctagcttatatactaactctatattgctggctactactatcatttacatgcaaggaataggcaaggaattgttatatatagcactatgtaagagctagctgctacaattatctatgcaatataattccttgaatatccctagctgctagtaatagtactggtagaggtagcagcagtattacctggcttgaggagagcacagaaaaggggccctgccaatggttctggatactcagatttccatgacagtggctgataaactaaatggcaaacctcacatgactttctacttttgcatatgacataaggaatatcaaagattaacatatgagctccttctgatatttacataaaaaaatgaagaatgcaaaggagtttgtgggctggacagaggcttgctttattccactcttaacttttgtcagagtaggaaatggaaattatccaggtgttttcttgcattgcatttatggggtgtttcagaaaatagtgtgaacaaagaaagagaaactgtggacttgagagaagaaaaacagaagcctgggggagaaaataagacacaaaggttcactaagatgtgaaagaatccacctactaaagctactctcctcatgataaaatcaagcaggcatgtctttgctgcgatgaatgctctgatttctttcttgctgagtagttaagtgggctcagatgtgggaaatttcttctcattttggcccttttatggccacaatgaaccgtcaacactgccagggaaaccattctcttccaatttcagaaggctgaccttgtgaggttaccactgtctgtccacggggcaagcttctcccagagctccagggaaggccttggctggctagcagtggaaaaacaactacaaaagacactttcaaaaaccccacacatttctcaagccatcaagagtcccaaaccctcttgcctacgggggtacaagcttagttttattatcatatctgacatcaatccagaagaatcggaagacaactgtatgaaaagcaaaaacaatttacagccataaatacttctgatgaagagtaactatactagatgactccagcaatctggaggggaatgtgagcctctaacttctctccattgttcatgaggcactgtcatcatgccaggtttattaattttcacaaccaaaattaccattgcatttttttctccatctatatcctgtgggttcaggaggaaacaatggactccaacattctaggctaggtgaaggcttccgtttattgggatggagtgatgcctcttaattgattaagcatcagtaatatatttgttgaatgttcttaaagaaattagggtaaaattgcagccaaattatgtgggatggttatacttttgaaaagacatcagatatgaattttaaaatattcaagaaaggcatttcaacttagcatcaattaatgagcatgctgtttttaggacaccatgaagcatggatcatagatgccagctagcacctccaggtctttggtctgcctttctatttccatggaaggcaatagaacagagaacttcgatctcgccagtctgagactcagaaggacgagataagacaacgctctcttctgcttccagatcagtgctctttatacaacaccaagatgttccattaataaaaaaggtagtcttatatcctttatttaaaatgatgtgtttaaaaaggcaactttgctctcttacttactgtaataaaatcaataaattagcttgttagagaatacacattcaaggacaggaactgagtggaaaagggagaaatatagttgggtgacaaattatataatgacactatgttccccccacctcttcctgcactcatttctctaatcattgccctcatcctggcctgtgttgcctgagatatgacacatcctctggaattagttttctctctctccttccccattagccaagccagcatcttctcaaggctctgctccagtctgaagaaatgcattcttcatgccttaaacaattctccctaaaatgaaaatttagatgttaaaatatatgtaaggaaatgagttgtattttaaaatatttctatgtttggaaaaattgttgatagtttgatttttttatggttgatcttttgagcatttaaaatatgtatctggggaatttaaaatgtgtcccagttcctttataggtattgagttgtacttgcacttgaggaaggttcctaccagagcagagtgtattgcaccaactctataactcattttataacatggagctgctgattgcaatgaaaaaaaaaaaactttaaagtaaaaggactgagataaaagcaaggaattaactagaccatgactccagacctatttttccttccatgttgttatgtgaactgaaatttggaatgaagaatgcaaatgtgtaggtttacatattcccaggaaggatgtgaccactgaaatattaggattaaaactgggatacttccagtgacatagtaagtgttcaggtgccttaaatataaagaattctatggatgtagataattgtaggggtgaggaagtgagaggatgaaagaaaggatgggaggcctgtaagccaggaagaaaggatgcagtgggagtgggttcttgcgatatcaggggcagaatttatcatggagacttctcaatgacctggagctagacctgatccaataaacatggaatgtcttggacctgatccagtaaatatgaaactttgctatagcaataactcaacatgagtcatcaatgaaagatgctaaccttgaaatacctttcaaaaatacaatttattattttgaagtgttcagaggctgccaatatcagtttgtctatgaatgcccactgcatttatattgtgcagtaagagcaatcatctcttaatactataataaaatgttgacaacgtaaaaagtaaatacactccaaaatgaactgctctagtcttacttggaaggtgtgctttttataatggataccataatgaaaaattccttgttaaatttattgtagcttttaataagctggctctccaaatatgaaaagtctgtgttgatacactgaggttgtatgactcggaaaataaagggagtgcatttttaattctgaaagataataagatatttaggtcattttttattttaaaacgtgcttgttctaacattcataaaaataagcagacaaacctgccagcatctgttcctcttatacaaagaactacctataatgaaattttggtcatactattacaagattttagcatgaaagtggagaaatccaaggcagaattatgacaaactcactgtaaaccttcctcagtaatactggtatgactgaaatcttaacgacatttaatgtgcctgtaatcctgaacatttgacagcttttacataatattctaggcaaaggtgacctgatcctcctccactattgacagtacagctgaaatggccctccaataaatgaggcaggcttatctagccaagatggcaaacaatagcttataatatgccccaggaaatttccatagcacattggatcattgccttcaatgacacatggatcatgcctgaatacaaagcacacgtttcactagacaataagttttaaaggacaagaatatgcaaagcacttcagatttaaagaccagttatgtgtttcacacttagaagtatagagagtttcattgaagaaagctctaagagtcttttagtgttatgttatcatgtgtcatctcccttagttgtcttctaatgactggaatgagcctccagtttagaaatcatagaagagccgggtgtggtggctcacgcctgtaatcctaccactttgggaggtcgaggtgtgaggattgcctgagctcaggagtttgagaccagcctgggaaacacggtgaaaccccggctttactaaaatacaataaactagctgggcatggtagcatgtgcctgtagtcccagctactcgggaggctgaggcaagagaatttcttaactagggaggcggaggttatgctgagctgagattgtgccactgcactccagcctgggtgacagagcaggactccgtctccaaaaaaaaaaaaaaaaaaaaaaagggaaaatcgtagaagaacacaaggaacctactaaatatgaattgtaagaaaataatgaaaataaacaagcaccaagaaggtgtatgtgagattacaaaaattgtgcaggacttctgcaatatgtttaagatatctgcattgatgtaccacataacgaatgctacttttgtttctcaatttatgggaaaataattgaagaagtgcttgggtgctttttgtcaattcatagcctacaagtcacctgttgtaaattcagtttataatagtgtaattagctaccacatggccagattttctaaatgctcttcctcctgttggaagcttgacaatgtgactgctgcagaatatcaataccaatcttttacaggcttttgccagaacagcctcaggatatgttgagctggagaggtaactgcattagagaattgagtttgttctttttcaaaagacaaatatagtatctttgaaactacttacaaggaaataaataggtgttaaatactagtgtatgacatcaaactaaacttgttagtaataggaataacctggcattgtaaaagatataggacctttaaactcagaaggtgaatggtacctaagagaaggaaatccagcatacgttatagacaaagtactaagagaaataaaatctgggagaaaaaaagtgtagcttagaacacttcactattaagcagagtgttgtcatatatgataacaacagctaaataattgcagatgtgtttgtaatttcttagatgagtaagaatatgaacacagtttttggaaatattgtagaacacagcagaatgcagctgagcctagaaataaaagttgcaagaatagctgccagaaaaaaacattaactgccttgtttgacactcaaaaactcacggtatgctttcattgagaaagagtttagttgatatggaaaagctagtttgtttggttatttttagcaaaacactttaacttctgatacatacgtagatacactacaagatttttcaacctggtcatgtcataatggacatgtcacagtggacatgttaaattaagaaacactttataaaaaattgtgaataatccttaggaaatcagtgaaagccactttataaaaaaactgcagaaacacataatttatgaacaaattttactttatgtcaaaatgaatagatttatttttatgaatatcacacagacatataaagctgttattgttgtgagcagaattttaagaattgtaggtgcttggcagttattggaaaactgtgcatctctagttccctttctaacttacttcctccaattttctccagcacttatgagttggcagctctcagctacatatagggcatgattcaccagggacatactccagatggcattgagctactcctgcagcaattgtatccacagtctggctgccttatccatcagctgtgtatgactagggcttggctcttaactctgacaatactgacgctattgcagaagtgacaaaatgaaataggctactgaaaacatctatctcctcacaaagtggaggtctttgcttttttgtttgtttgttttttgctactttttgaagaagggtgtctactagattgttgtaaatgcttttataagagctataaggacatttggaaagggaatcctcagatatctaatgagcagtaccataaggagtcattctctttgatgcaatattttgtgctgtcatatgaagaaatatagaagacaacataattataaaaaacaataatcgcgatttttgggggggcccactatttcctaagcacttaactgaacaagtgatatgcttttcaattatttttccaatattaggaattatggttcaatgaagtaaactaacttgtccatagtcttggagattacaatatgaacaagtagaataaggtcctgatatatttttaaatatctcatcaaaaaaggacacaaacattatttttgaaaataaacacgtagcaaatcaataaatcaagatactgatgtaactagggaacttatatgaccatgtgaaaatatatttttctctttttaatcatgtgcattctgggatatatgaaaggattgggaaaaataaaattcattatattttactcacaaaagtgaaatattgatgtgaagttctcactacagagtaattgtcattgttctatttagaattctctttgcctattcatgcagtaattatggaaaacagacccacactgttggtcttctgatagataacatccagattggctcaaattttcctcatttgtggccttgcttctaaaaatatgttgacagaatcccagctatctcttctagtaaatgtacttttgtaactagttgagtgtatatttttctattgattatatacatatagatatacccatttattcttttctaggctgaattatttttattaaagtaatacctgtattggttaaaaagtcaagtatttctccaaggtttataataaatgaaacagcttctctcacacaacttctcctcacctcagtgatttgccaacagaagcagccatttctaactcttttagctgttttcttctgatatttacttccatatttctgaatggttagggagtcactgcttgatttttaagtttttgacatcatatatcttgtcttcactatgaaagatgaaactgtagctatttaccttgcctcagttcttcctatcaactatatcacaggttttaattaaatcagaattgtttatattattatacaaatattattcaaatattgtttgaggctgagtatatttctagtctagtacacatttttctagaagtaataatagcctaatcttttcttttgtttatttttctgtgtacctctaacgaatcattccttatattctcccataaaactttaaaatttgtcttcctatcatcagacacatctaaaaccacttatcacttccattgttttttgaaattttctattctctgcacccttctgccacacattcaaaacacaaacctacacaactgttgtctaatatttaatattaactatcaaattataaatatattgttaattcaatgtaatactcaaagcatggtagcatcagcacaaaatctatgcttgatacaaacccagtctttgaggagcttaccttctaagagaagatgacattcataacatggatataatttaccaaggcaattcagagcagtgaaaaaaactgatacaacactaccgcttgttttgctaactcattttgagatcctgttcaaacagttgcactctctctaggattttgatgtaccacaagaagtaatctccccagtgtctttcaaccccaaaactatttgcttcttcaactatgaatgagtctgcgaataatacacaatgatacaaacacatagcatttacccaataatactcatatttaacaaattaatagtaactctttagctttttaaactgtgctggatcaaaacaagtgagatattttccctcacctttgcactgaccaagaagttacaggatagctctcagatgagaaatggtttctcatgggtaattcacgtgtgaactatttgaaaacagggaatatgggcttatccacctcttcacctccagctactgctatagcaggaaagctctcataaatgtctgtaaaaatgaattgagtgaatttttgtaaaatctgtgttgaattgttgagatgtagtaagtgaggttatcataagggatatgtgtgaggttctttctaattcaacatttttattaatgtgttgagggaagatgcagatctcaaaacatactcataaaattttaagatgatcctaccttggggggagtatcaaacaccagggacaccagaaatataatccaaagaagttagaactgtctacataaaaagaaaacttggccttcaaaaatgtaaatgactacatgagtaaaaagtggtataaattctttccaggcaggggaataaaagaaatctggagtctaagggtgataataatttgcaaattagatctgtgtttaatgtggaatcactgtaaacagaggaagagctgctttggcctgaatttagggagctttgtgtaataaatgggccagaaaattagttgccttctctgtgtgatgttgaaaattctctagatttaaagtgctttaattttaactaaagtcattagaaattagagttaaaatatgaatttggaaaggaaccccacaaatatgagtgttaataaaacaaatttctaataatagtttttatagagtgggtacctcttattaattccttagatactttactggcacaaataccgtaagtatcactgactataccccctatattatctgtttaaattgtcagaactacctttcaagtgaatatttcccccgttcaaccaatgatgagacattcaaagacttcaaataatttgtttgtcaatctaacctgccaacatcaaagtcatcttgcttccaaattttatacttaggtgagaacaaagaaagtaagactgtatcatttagctaagcatgtctgaagatattttctttaaccagcatgaactatgcattgtatgaaaggaaatatatcatgaaattgtattatgtgttatgctataatatacatctgccctagacagaggaaccctctcaccctgaaccacactgttaagatgcgatttaagaacattcactcccattagtctattttcccatctcaaaggcaaaagacttctctatttacttgcactactgagatgtgaggggaaagggcataggacattggctccagcatcaaactgatgtcacattcatttatgttcctctacttgttggctggaggaatacacatgtatgactatacacagattgatctgccttttggggtgcattttcctcaacaaaatgggtttgatatcacctatctcttaaagtggctgatgatagtgaaatgagataatgcctgagacatacagcttaccaattgggagttattattgattgagtgatgagcattatacgtattcccacagggtaatatcagtggttccatctggaaaagcagatcaagagtttcataggcagtatggcaatgaggccaggcattcctccactgcatagtccacactgcatggctcatctttgcttcttttctctttgtcccttttctctccttcattctgtacttgcctctaccccctcacacttttgaatatttatatgtgattcttcccactcattcacacttcttgctcattaagacaaggaaaaatgccttattcaactttgtatcccctaatatcaacagagtgctttaccagcagtaagagttagactactgcctgataaataaatgaaatcaggatgctcctttaaataacaacagcaacaaaacactcagttttagaaaataaaaactaataaataatggcataaattctattcctttgtttcatatttatgttttatgtttaagaatcaaggcagtaattgatatattactatgttgattacttttaacccagaatgaaatcttcaataatttaataaagaatgcatacaaggcaaaaaagtaaagtttaacagctattgaattttattaagccttaggcaaaaatctcattcagatcaaaggaattttttgtgaaggaagaaaaaggtacaaagaagatgctttgagaagcactggtaaagcctgaagctatccaaaacagcttactgtcttttaagacattatcccaatttgtaacatagcacacataaaattcactcatacctgaaatcgagagctcttagcatctttatttgcttttcttctgtttttgtggccctacatatgattttctttgcaatacaatgagtgaaatgtctttattgaatattgggatccaacaatggaagaggagagaaatacagtttatggtaagacatgaagtgagtgtagaaatatgtgaacatgtacacacataatcacacccacacagtttaacgcactttctttaggtcaaattgttcactctctgttttgatgcagttgattgaactggcctttacattatgataatgaaatccatttcatgacacactaatactccaatattaaaataatagtcatgacatgtgaatctcgtaatcatcagaatgttctttgcaaagatcagaaaatgagatggcttcaagggacaataactaatattagcatatactgtttgttacacttggatggtttggaagatttggggtcaagaggtgtgttgtgagaaaaatgtgttaaatgcacgtacacaagataaaacaaactgaaacgtgtttgagaccctggttttattctactatttttactttttcatagttctttcttttctggatttcatcaaatataaattttcattggttaattataaaatgactttgtcctataggccaagacagaatgaaaccatttagaaaagcatttaagaagtcagtttttactgaccatccatctaaaagtagtaacaaagctggtgaataaagagggtgggttttttttttctaatttgggtgaattgtggaattattttttatttaggctattattagtattatataaatttagtttaaaataagaaagagagagagagagagagagagtaagaataaaaagaagaggaagaaagagaaaagaggtgatataagcccaaattctcacctcagctcttcttataagactgcccttaatctacattatttttaacaatcctactttcagacactacattctagaaactagctcaaatctttcctactataattttggtatacttaaaattatctataattaaattataaagtgtgagacacatagattatctgaaaaaggaaacatttggagcaatggagctacttttaggaataacatcatgttttcttgataaatgttaacaaaaaatcttaatattctgatgagatatacaaagatggagcaatttatttctagaaacaattttcaatagttaaagtagaaaatggtcagtgtggcagagccagtagtcttaccaccattatataaatattaatatatacagcagttctgtatttatttttgcttattgatatgtggcaaatttgtcagtgactctctaatcttctactcgaggtaagcattaaatatagttagctctaacagagaatatagtttctcttcactcatacattcatttgtgcattcattaatgccttcatatacgtatgcattcataacagatattttttgatatctcttatttgcatgacgcatctcagtgatgggaagatttttaaataattaagtcaaggtttgcaagagcgcatctctcttacaaactcctgacaggaaaacctgcacaggtagatagtgaggttctaaaacccaaggcttagtgaatttcttatatagacatcaggaaatgttataccacagaaaaatgctactggggatagccaagcttaccatgggaagtgtttctgggcatgttgatattccttctctttaggctatatgaatgcctgcttcaaggctagaaactaaagtcacactgcagttggcccatatgcttctcttaatttcttgccccaacttgccaagaactctgcctcaccactgatttccttggtttccagctcatttcccttggctcactctcttggacttaacagttggtgctatctctcaagccattatcattgcttctttcctggacttcagttcaaatttcactctggctactctcttcttccctgacctacctgatccctgcattcctcaatctcatcacatccccatgtaagtaatgccccaactaattccatgcccctagaagtgacactcaatcacccaagactctagtgaaaatataaaggaaaaaagagactagataccaatcaataaataacccttattatataatgattgaaataaagcagcaagcatagaatttgtccttatatctttttcttgctaattgattatttaagttttaaattcccagaaactattttctagatttgattgattgactccttgccctccacattctcttagtaaggtgttgagcgtttgttctgcaatttaaatgggaattttatttataaattgctcgtacttagatagagtcctagagatagctcagattgggagactgcatttttatcaaagatcagaaaaaatttccaggttgtctaaagtaagacaaattattatcatctttcatatgctctgaatctaaaagtcactttacaaacactatctatatattaacatataaaatacagcccttttagagtactctgctcaatatagatttttatatcttctctccccttaaggatctcagaattttacaggaagagagtcaattagataaataaaacaaagaaacatttccagtgactttattccaagctctcatgaattcccgatttattaatagctgtagctgtcatagcttaaaaatccattagaattaggcttatttgcatgtgacgtaaagcgcaaaataactgtagcttattttacaaaatagaaggttgttttctttctcacataataaagcccagagttacagtgcaggacaggtatggtggctccaaagtgtcagggttttaggttcttcgttcttgccttttcaccctgttatcaaagggccacagttctcagagtgatctcacagtgtaaaaggtctgctctcctgatttcatctgcactcaaggtagcaggaaggaaaaagaaccatagacggttggccatttccccttaaaatgcccacacctttgcttgcttctcattggctaaaacccagccccatggccacgccctctggtgcgtgtgaagcctggcaaatgacagggcgatttgctgccctgaaataaatctgttttccctacctttactgagaagagggatgaatgcgggagtgagtaaccagaaatctgtgccccagtggctgctctttcatagcgttttccttctgttatagaacagtacagcaagtcctatgtcacaacttcacagaaatcagagcagtcacaagccacgtagcccaaatccctcaacttcctattgatgggaaaaggctaaggccatcagaccaaagaagaagttggtctttattaagtaaaaaataaccaggtgtcactaacaagccgcttttgagcaaatttaataaaaggcttcctgcttctgtgcagacagaaccctgcccaggacactggtttagtgagactggaggacagagaacctgcaccacctgttggattcttgagaggaggaccggattttatttgcctttgcacttgtcaacattactttaccataactttggacacaattgatagtcagcatatatttgttggctaaatggataatcaaatcatcctgtaactactactagtcatgaggacactaagaaagtgtaagagatgtaattacttctccagcccaaattagatctcattccccacttccctatcacctgaatccacccagctgtacaagaaacccaacagttgtccttcatattgcctctccctcgtggagaatcaatccatcacctaactggtagattttacttcatagatagctctcaaatccatagatttttccttctctgtactattatcaccaccaaatccagttacaattacaattgtttctctcttggtcacagtagtctcttaactgtttgttgtgttacccctactctgcctcctctcctacttcccacctcctctctttctcatacgttttccccactgcccttcaatgtcatgtaatgctctttgtggcctgggatgctcctaccatcttgaactttcccccaccacattcccccttgctctctttagtctctggcttttcttcagacctttatattcaatgtggtttatcccacgacaggatctttgcatatactgttctctatgcctcgaatattctttctttcctattttgcctgataactgtcattcattctttatttctcagatcaggctatattttcctcaaacaggcttttctgactccctcaatgaagcaaaatcttaatatatactctcacaattctatgtagtgctcttatatagcacttatcactgtgacaattttatatttgtttgtgtggttgtttgattcatatccgttacattcaaaggaccttaagccctgtaagagtggagattatgctttctcacactcacccttgcaagcctgtcccaataagtgctcaataaatacatgctgagtgaaggaagaaaggaaagaagggaatattatatctatctatgtttttgctgtactacctatcacaatgctttgaacggagaaagttcacaatggtttttgaatgtaaggacggtactattatattaaaaaataaagctgtcagattgaagttaggaaaccaaatttattccactgttccagacatatcactaaacctgctgagctgtccattttggaatagttctgattcagtgaactagtttagtattagcagagtggcatcttagcgccagaacgtctgttcttgctttcttggtttgctcctgacatgctgctcattacataagttaactactgaaaatttatgtcaacctttcaaaaagtggattcattgtcctagatttgtagctcagaagatgtggagatagtctaatacctcattaagattcaggaccactgtcagtgaaaagaaaaaaaaaatgtactgaaaagaaaggagtctgcagaccatgcaggtgaatgaaaagagttgaagaaagagctttgtaggcttcaaggaaggaggaaaaaaatgttagcagctctgttcttgatgcaatatacctctaggtctctgaattgcctcagatcactatccagatctgaagctttcagactgctctgtagatgtatacagaaaagaaggttttctctacaatacctaacacattgtaagatgttggacatggtaagttcaagatggtttttgaatgcaaaggacgtagagaccagacccttgggtagctaagatgtgtagcatgatttatcaatgcttttgaacctcttagtaactgcttgagcaaagtaagaaggagattatgctccatttttttatatggcttgcccaagatcagattcacaagtttcctcgctttctgcctcccggttgagtcactcttctgctacctttcacagtgtctgtcttagacaagaacttaaatcccccccaccaactctaatgctattgctgaaaaatatccaccctcctagactctgcctacttcgattccagaatgtatctgctttgttttgggctaaactcttagaattccctgggcccacttagttttagagtatcttctagccttccactcatctaatgtgcagcttcttgggctcctccttaggttctggcccagatagacttgaaccttgaggctaatgcttcagaggagctttaaaatgatctgcttttctgcaggctgaggtgtgcatcctatcaccttgctatagaacccagctagccattgtctacgtggtgtgttaggacctctggaaagttatgcatctttcttagtcaatattatcttactctttagatttaaggagtttggcaaaacacaaagcttcagggcattacattcctcatgaggatccaggtggtgagattcacacaaattgtcccaggggactcactttcctaaataaagaaattatattctccattttctttcagcagtgtcttttggaacattgagcaagtactgtttttaaaaccaaagaatatatagagagccttatttctccagaagacttaaaaattgtccagagcctgagaacaaatgaaaatacaaggagaccaggtgcaacgggtcacatctgtaatcctagcactttgggaggctgaggcagttggatcacttaaggccaggagtttgagactcgcctgggcaacatggtgaaaacctgtctctacaaaaaatacaaaaattagctgggtgtggtggtgcaagcctatagtcttggctccttgggaggctgaggtgtgaagatcacttgatcccaggaggtggaggctacagtgagctgtgatcacacccctggggcagcctgggcaacagaggaagaccctgtctgaaaaaagaaagaagaaaggaagaaaggaaggaagaaaggaaagaaagaaagaaagaaagaaagaaagaaagaaagaaagaaagaaagagaaagaaggaaggaaggaaagaaagaaagaaagaaagagggaaaggaaggaaggaaggaaggatgggggagggggagggggaagggaaggggaagggaaaaagaaaatacaaggagaataagttggttagcaatgataactccattgagcaagcttctaaactctgacagcagggtatagagaatttatgcttttattttttatcttttgtgttgtttgttggctgaggtgctctggttgggactcaggtcctgagtataaacagataaaaggcaaagtcctacatggaaatccctccttgcattcacccaagtagagaatgcaaactcaccactgctcctctcttaccagcgtggtatatcctaactctccttatgcaccagcttataaaaaatatgtccagtaggaatactctacatcctcagacaaccaagaccctgctagcctagatatcacacatgatcagaatgacaatgaggaagtaaaattataatatttggtagactcgtaaatagtttcctacagtggtggaggaattgtatgtgacaatatctgaattacaataaatagctgttgattgaattaatatatctgtttttcctaaactaaaagtagcgaaagaaaagagtacttggagtactatgttataaccatgcatacagaatcccaagaacaagtatgtcaagctagcaaaaaaaagacaataatgtcgtgggctgtagcagataaatttcactaggaagataatcctagaaacagtacaaaaacaaacaagaggagaggtgattagattgactatagaactaaagaggtaggagaattatacattctctgaaaatgatcccaggataaatcctgtaatctgaacccatgaaagttggttgtagcatcagcttcttggaatttttttctaaatcagaaacagagttgtaaataagcttaccatatctcaacaccattagttcccaccagaaaactttactttggctaatcacattataggatgttctgtggatctctgtgctctttcaggtagagggccaacagcaatatactgaatagtccagtattctcactatgagtcaattatgtcctttctgtttctaatccatccatagggctgaatagagccatccagggatttccaaaacagaacagagaaaatatgcactttataaaaattgaagatattctagaacgtctcgtgttgacttacttgagtcttcctgccgttgttgatttcacgtagataccacttattcaatgacaaccaaagacacagcacattgcttcaatttttattaatcaaatgctaaaggataccaccctaaccatgttgaaaacaacttgcttatggttgatagtttcaatttaaagaaaataaaattatgaatataaaaattttggtttttgcatattacattgcttgcaaagctatcaattgatggatagatagaagaaagaatggatgaatgaatggatagatggatggatagatagaagatatacagatttgtttatactgtattactgtaagtactgattgccattagagaactttttattattattattattttccttctttgagacacagtcttgctctgtctcccaggctggagtgcagtggcacgatcttggctcacagcaacctccaccttctgcgttccagtggttctcctgcctcaacctcccttgtagctgggattacaggcacatgccaccatgcctggctaatttttgtatttttagtagagatggggcttcaccatgttggccaggctggtctcaaactcctcaccttaggtgattcgcctgcctcagtctctcaaagtgctgggattataggtgtgagccaccgcacccagttgacaacccatttttgttgtgaaaggtcatatacagaaagtatgccaggtccatcaagagttcttttgcttggagaaaggagggtagaggaaagagctttctctcgatttgaaacctaaaacatttcacgaataaggtaaatggtttgttccataataagtgccattgctacacttgttcttacttcacttgttttgcatgcaaaacagcaataaactgattttttcacattttacaatggaaagaacatagaaagatttaagtttcaagaaaggagacaatgcttttaaaactaataataacatataattgccagaacagtccagttgtttaatgttacaagattgatatttctacaattgtgtattttaagttaaagttcaaaaggactgactctgtatgtgcattcatttggggatatttatcatggtgagatgttagctcacgtcatttcaggtagataaacctatcttcaagtttgcaaggaactttatcatatcagggctgagcaccactacaaacttacttagcataaagttttagagactgaagggacttagtgctctgttcatctggccccacactcagcatccctggcaaaggtcatccagcttttgcaacagcactaccagagataaggaactcattggagagctttcattattagaaaacattttcatatgttacagtaaaatatgccttccttggaccacagtctacgggttatacttgtaatctttgaagcaacaaaaattaatttgatcctttttcatataaactttctagtttgaatgtttgaaacaattattatgcacttattatattcctacttcagattaaatattaattcttcttaacatagcttggccactttttctcaacatgcattacaattgttctacatttctttgaaggtgaagcacagacatatgtaaaagatagcaaagttgtctgggacaggtgcaggagaacaactttttcctctttaggtctgaatctggtacttctattcatatcagtagagcccatggtaatattcacttttcagcggctgtatcacattgttagcttgtatcaaaatttcttccctgtttcacataagcattttatgtcacgtcccccaacctcttcatgtataatttctttttgagacataaataaggaagtttattcttgctatgttctattggtttagggccagagttcagccttctgagatcttatatgctagtagcaaattcctttagatctttgtttgtgtcatctgaaatttttataaacatcttttctatattttccttcaagttgttttcgattatttataacttttgttgttgcaaaagaattggaatatgattgcataaaactcaaaggggtgtttaaaatggaatcaggttgaaagtggaatagtacagttaatcaaagataaagttagtacacagaaagacatagcacagggtacttcacaaaagctagagttgggatgcaaatttggctctaattttcaactttgctgcccacagtaagaggtcaaaagtaaaatgtatgtctcagaattcagtactggtaaagtccttaacattatctacaaattcctgcgtgatctcatatcctctttactccattaccactctgacattctctcctgcagacaccctggccactatgaaaacgtcaggccctttcttgtcttagaaacttttcatttttttcttctgaaaccttgaatcctcctccttcagatactgacttgactcattctctcacatccttcaagtctgtctcaaaagtcatttccttggtgtattagtctgttttcatgctcctgataaagacacctgagactgggaagaaaaagaggtttaattggacttacatttccacatgactggggaggcctcagaatcgtggcgggaggcaaaaggcacttcttaacatggtggcagcaagagaaaatgagaaggatgcaaaaacagaaacccctgataaaaccatcagatctcgtaagacttactcactaccacaagaacaatatgggggaaactgcccccatgattcaattatctcccacggggttcttcccaacatgtgggaattatgagagtacaattcaagatgagatttgggtgggaacacagagccaaaccatatcacttgaatatgagtgactttctcttctttcctactcttgccccagacaataatacccttctctccaaggctggtcctctgtggcctaaaacactccctcccagtgttgctcaacaccttgctctcccagaaagctctcttttatctactttacctcttgtccagtaatactgtgaccccccaactctgctcaagttttcctcatcctaatgtaagcaagcaagtaagtaaaaatctccttttttcggttacccttttgagcagtcattttgtttcctcttctttaagccactgccaaaccaccaatagatactttttaaggaagaaagaaatctatattccatgctcctgcttcttcctcaattattattctcttgtagtctggctcctgtcatcagcatgctactaaaattactctctaagggtcaccatgacatgccaaatccaatagccttttcatagttctcactatttctgtctgcacaactgaacattactttcaatgatcttgagtgttctgaacatctaataaatttcaaaaaataattattgtttactttcattttgtaaacaaaagtatgccacagaaatcctttaagaggccattcttccttggcttctatgaaggatttttctccttctagctctatgacatgactttctctttatatcttcagggtccttttgttttatttctcctaaatgcagatgtagcccaacagctgttcttggcctttgtcatttccttgtatgttcttctttgataatcatacactcaatgactttactctcagatctgacctttccccaaagctctagcatacatttttaactgcctctgtatttccttctgtgcattctgctggcacttcaaacataaatatttccaaaattgatttcattaattttccatcagacttgttcttcttatgtttactattcatgattaatactacttacccttcttacagttaactaaactagaaatcttagtgttggtgttgatgctttcctgctagtacatctgggaccaaccttgtctattctacctgaatcatatcgctcacgacgactaacccttctccatccattctgacactgctttggttctgatctctagtatgtctctctagcaagactgtaaagtcgctctgatcagccatctcatctcaagtcactccttctcccaactcattttacacactgttatcagatgaatattcctgaaacaaagctctggtcattacaatgcctggcttaaaacctgttattgacaatgcactgctgacattctggcattcaagatcttcataagttagagcttgtataattattgggaaagaagttgctttcttggtgtttgagagcagatcaaagacctgtattctcaaaagagcagcctacacgttgggcttgttcccactttataattctctggttgatataggaccctcatttgttttaggtcatttaggacattatctttatcctcttaagaacttccagcttcagtcagataccaggttctagttctctggtctcttttggggtttcatgaggcagagttagtgctctcatgggacctgggactaattaaaaaatcctcaattctcttttcattagaagtttgccctttgtttgcttttacctggataaggagcaaagaatgtagttccatttttatatgtactttaagccatcatcttgtaaacttgggataaaagatcagttctcatggggaaatcagacataggcagtgagttctttctcaatcacaccacataacaatttattggatagggcctgtgatgaactttaatgtctaatatctgtaactatggaatttacaagcagcaggtaagcagctggaccatttcactgccgtttctttaagctgtgtaacctttacagaactttccagtgatgtttctgctattaaagtatgtacgttttacatttatatatgtataaaatatatatgtcatatatataatatatgtatatataagtttctatatttgggtgtgattttcagaaagaatggaagggggagattggaggagagagtatgtgaatagaaaagcaggaaaagagaggacaatgttcattattttagaatttgttaaatataggggaaactttttatatgacatattagaacactagggatcagcctcctataaacatctattctacttaaaatggcaaatataatatacaaatagagacttacatgcctttataaatttgccgtgagtagaacaaactgagaggcaagcaatggaattagcatgcgctgacattggcaaaggggtagaaaaagtcttttaaagaaaacagaggtgagcagaacagaaaacattaagaccgcaagagtagaatttttagatttcatttacttttaaaaccaaaataaaaaggtggacgtggaggcaattgacaaagccaacaactctcttgcagtgatgcccagtattctgaagcatatgtgggtgtgtcttttttgtttgttttttggagacagggtctcactatgttgctcaggttaggctcaagcaatcctcctgcctcagcatcccaagtctctgagattatagacatgcatgcaacatacattttgagttatgtggaccctctaagttttctgcctctctgagtgagaatatggataatcctaacagatttacacagatcctgtcagcaaatacctgtgggtttttcccatctaacatcccatagtgctttcaattatttcaagcaatatgaagttctgaaaactaaatttctaaattggaattaactatagctcagtctaattttggaaacaaaaatatgtcatacaaatccattaagagacaatcactaaatgatatgaatgcttgaagtctggggatcagtgatgtgtgtgataagaatataaaatcttcataagtttgacacatttatcgaaacttatgagcagttcaatccccttgttcaattgaaaagaatatttgaatatttacagtagaggtgcctattgctagatttgacatttggagtgacaaagcaagaaggaaaggctgggaagtggcatcaggactaaattctatccacaggacttgcatgatggactttatagccagaggaaaatgaatggtctcaatataggaggctttggagctccttttacttttgatgtcaggaaagctgctgcctccacattttctactctttttcttcagcataatgtgaggtagagggtcaggggacacacttgtggcctctaatggccagataatggaccacaataaaagttatgtgtccctagctggaggtgaagacatataatggtttacaagatccattatctaactatcagaacctaaagtaaaaggagacaattattaaatcaaagaaaagaaatccatttccacttattcaagaaaaagaattttgcttacgtgctgtgcatttttatacaaggactacccttgtctttaagtaataagtaataattacagcagctagtgtttattgagcatttacaatatgctaattgccttcacaaagaacatgatcttaggaatcagactccccactttgaaattttggcttcagcgcttgaaggaagtcaacctctccacgcctcagttttattatatggaaaacaatgataatatcagtatatgtatcatatgatcaccaagtatgtcatatattgagcccacaataaagatgctagttattattattgctgttgtaatagagccattgttgacatttatggatagcagatatattgtttagatctctgattagccccatgttatgaattaagaaatgaaggggatgaagtggagatatttaatctggaggtttgttaatagattttaatagactttaaaagagtcattggctctttgaaagaaaccaaaaaatattttattttgttgtgcatttgggtgggtgaaacactccatggttttcaccaaagtctcaaaagagctcttggccctcaaaatgctaagaacccctgataaactaaatttcatgtattactttatctatcaagtaatgcagggtggttattgagcaaacattttaaaataaaatcatttttttctcctttttaagattttctgcctttttaagattaggaaaaatcaaatataaaaagcaatgacagatacatattctgtctattctgtcatattttgtctgctgagtgccaaaatgggtgcatacacgtcacaatacaattatccatttttcatatctccttaagatctcttttcaagacacatttggaagaaacaaaaccaagtcagttatgaaggtgagaagctatggatttagtgtcttggtaatcattcctgagcaatcaattgatacatctttagtggcttcatttggcctttggagacccctggaatttgagttgagattcccatgaacataatggtaccatgatatcgacattaccttttttcatatggcacttggagaaggatctacagcaacctctttcactccttgagatataactatcatctatgcagtgtcagtctctgtccaactaatgtgggactgttagagctactgaaacatcagaagtggatttgtgggccccagggtgcaacgtaggtgctccagtgatagatgcactgaaggccctaacttcaggacaatgcaatatgtcaatgtagcaaaactgcccctgtaccccatgaatatatacaaatttttaaaaattaaaaaataaaaataaatattactcattttcatggcttaaacagtggtttaagagcacacactctaaagatgggccataagggctgatatcccagctgtgtcattaccagctgtgcacccattggcaaattaatacacctacctctatatcaacttttttctctgtaaaatgggggtacatataatatttacctcctaggactgtcgtatgaagactaagtgtattaacatatatataaatcactgcaacagtacttggcatatatgagctataaatattagctattaatggatcattatgtaatccacttcttggggattaagaagaaaatatttgggtgctaattctattttccttgctgaatgacctttattttacatttagacaaattgctaactctttgagtgccatttttcttactttgatgagaaactaatccccacacccatgatggtgtgtgaaatcaagaatgtaccagtgctttgtaaattgttgagccctgggcatatgactttttttttttttttttttttgagaaggagtttcactcttgttgcccacgctggagtgcaatgccgggatctcggctccccacaacctccgcctcccaagttcaagcgattctcttgtctcagcctcctgattagctgggattagagggatgcgccaccacacctgactaattttgtctttttagtagagacaggatttcaccatgttggtcaggctggtctcaaactcctgacctcaggtgatccacccacctcggcctcccaaagtgctgggattacaggcgtgagccaccgcacccggccgccatttttaaacatattaagattcaaatatatctacaaaatttatcatgcattgtgttttttgaaaacattttataattaattctaaatatctacagaagcaaaatgctaattacagagcctagaggattttttatgccttatttgtgcatgttttatatggcataaggagaaactgtggcgcacagatttttctaagaaattttctagttaatcttagttaaggctctggtcagcttcacgttttcttagttttttgatggcgaagggggtgcatttgtgaatgaaccagaattctggttcaaggaaacagctgaccccattgctgactccttcacatttggagaagctgagtagaggttattgaatattaatgaattttagtttcacagcatttcttcttcacaattccagggttttttttttttaactagtttttaaatatttttgactgaattttcactgttttaattttggaagcatagtatttagatgattctcacgttggtttgattagtcttatattttatctgtgtttgccaggacttgaagatttataaaatcaatgtgtatcaacatgtgcttgctcaaagccttttctatttctgtcgtttgtcataatgagctggaaatgctttcctaatctccctgaataaccttctacccagcatttctggagtcactaaaaagacctgattgtttacacctcaactttttaaggaaaaggaatccagaagctgacatttgtatccatgcctctatcagttgtctgtcgttgcataacaaaccaccttaacacttactggcttaaagcaactatgctttattatttctcactcttctatgggttgccgggtgattgctggtattgcctgggcctattcatgtgtttgccatcagccgatggtttggctggggcctgagcttagctgggattgttgggtggctgtctctccatgtggcctttcatcctgggattccatacatggtggtccctgggtaacattccaaaaggaaaaaaaaatggcattgtgtgagttcaggagcagtaggggttttgactcctgaactcacacaatgccatttctatcttattctattggtcaaagcatatcacaaataaggacagtccaggtgtaaggtttgggagaatagattctacatctttatgggagaaactgcaagggatttgtggatatgtttaatctatcaaaatgtctggttgttgattttttagccaagggtttctttgttagaatgttgacagaaactgtgaatttttgtcagtggcactggagaaagccaaaagatttctctatcagagacagtaccccattcacatttacttaggatagtcccatgttgtttaattactcaatgtagattaattaggcaaccattcctctacatacaagtattgagctctttgtgttttacccgaaactacaagagtgttgatccttatactaaatttagctgtcctttgagggaaaatgagcatgtcacattttcagaggtttatagaaaaacaaaatcagggtcaacatcctggttataaacaatattaagctcctactgtgtacaaaaaaaatgctgtttggggattttcaaatggtataaggtatgatctctagtcacaagcttaaattttagctcaacaaacagtcataacttagtaataaacaattaacttttgaattatttagcacacatttatgggatgtctcctatatacgtaggctctatattaggcattgtgaatgtaaaaatgaacccatctgggtctctggtgtcatgatttagagtgtagttagggaagcagaatatgaacaagtaacaaaagtaacttaagcaagtaaaaaagtaataaaaacaaggacaaattagtattacaaatgctctgacagaagattagacaagatatacaggagatatgtattgaggaatagaatctgttacaaagaagaggtgaggcttgagttgagagttgagtcttgaaaagtgggcaaatgatcttcctgctgaccggtaatgtctgtgaggttcaggaagatgaagcagcatgaatacagggatatggaacacagaaaccatgggaaacaccaggagcttgcaatctgttgtgtgactgaaacccaggattcagggtgagatgaagaaggggagcaaggaacaaagaaacaaaaagaagtaataagcaataaacagacgtggccagtgacttaatcatggagaacctaaaatatcttcctatgaagtttggatttgcatccatatataatgggaatttgttgaagaattttaatcagaggatgacataatcaaagcattttaggaagatcactctgacttctatatgtaagataagttggctatggcagtactagagatagagaaagtagacagtttgttgcactaatctaaatgagctatgataagaacttgggtagcggcagaatggatagagagtaagaggtgattcataccttcaatagacatgtattgtgtcttccaggtactgaatgctaggtgatatgtcaagtgctgggagtattgtggcatagaactgaacctgtaactgtgcaaagagagcactcaaaggcagatgtaaaaatttttcaaaaggttcaagtaaaagaacctgcttcctaactgaatgtaggaaggaaaaaaaaagggggaagaccccagaaatcccaagatgagggaatggtggtatcttaacaaaaaactattatacaatttaaacagtaggtaatagtagatcaagaaagtacattcttttacaagtaagcaaaaaataaaagtgaaaacatgagtatccaaagaaggattttagaggtatcaattttagttgtatttatgtattgtcttcaattttcaaagatgacactatgaacaagagtgtggggtgtgtgtgcctaggtgtcatgaggtctgatggaattattctactccttttcatcttgtctgtccttgacaaagtctgccatatcttcctatgtgtggtttaattgaacttgaccctaagatttgattatttcaattccctgtggctcaataattgggtcccatgtgtggtgtggggaagttgcactgggtatcccacagctgctgcttatgtgggtggattaaattagaacttccaagtatatcgcctgctcctgatttgatcatgaccataaaaatatattttctgttaaatttttctatataaagccaactagaggaaaacaaccaataatagtaactctcttcctctctgtttacatgttcatctttagctaacactattacactgtgactaggattcattattatattctgggtatctatttcacctatttgtggcataaataccaacttactggcacaatgataaacccattacatgtgactaatactcaatgtttgacattaatcttgcttctagcttttcattaggtcaatcaggaaacctttattgagttcacattctgtgctcagcagtataagatttaggggaagcagctttgagaaggatgcaaaatcatccctcaccatcaaaagaagagatgcagataccaaatacctgacgcatattattcattcattcattaagtacctgttctgtatttggctataggaatagaaaaataatgctgctttcaaaatgtttaaagttgggtgggtatctaagtgattatgaacatcatataatatttggcactttacattaacttattaagtatcttataagttatacagggtagatgttattacccttattatcaagccactcaagaagcttaagcaacttgcatcaagtcacacagggaactaggattgagttagcattaattatgtgtgagtcctaactctatgatctctcctcaaaacaggagaacttagcataatgtgctaagttataattaaaaataccaccaacaataatattcaaaacaaaaagattttctcttaacgttgcccatcctttctttactatctctcacacacactttgtagctgaactccttgaaaatatagcttgcattgtcaaatttacctcacttttgtatttcaaccacgctagtgtccagatctttgaaacccccaacatacagctacctataaacatgctggcccccggggccaataaaaaaaataactttcttacttaaaaagggatctcatagttgccagtgaaatatactcttttaaattcttatttgacttagcagtaaggaagtagtacagcgtgctaaaaagattatgtgtttcggtattggacttctctgagttaaatcccggcgcaacatgggttcgtacctggctctgtgacctctgccagttacttaggttccctgggccttggtttcttcatatataaagcaggaatgatgatacctatcataatacctctggatgtgttgtaagaattaataatttgttcttaacatgacagcaaaatatacttttcgagcactcaataaatataactgttattatttatcatcatcatgaaaacctctactgcctgtgataaagttgataacctccttctctttttttttcttttctttttctttgagaaggagcctcactctgtcgactaggctggagtgcagtggcgcgatcacagctcactgcaagctccgcctcctgggttcacgccattctcctgcctcagcctcccgagtagctgggactacaggggccggccaccacgcctggttaattttttttgtatttttagtagagacggggtttcaccgtgttagccaggatggcctcgatctcctgaccttgtgatccgcccgccttggcctcccaaagtgctgggattacaggtgtgagccaccgtgcctggccccctccttcttctttcaattcctttctccctacagtttatccaggcgagtttttcctgcacatattttccccttttttgttcattttcttctgctgctcatactttaaattccagcatcccccagtgtcctgttcttggcccagctcttttcttcttctatttatcgtaggacatgtccacccttcttgtgatttccactgcctctaatatatttcctaaagttatatgtgaatcctagtgctttcttctgagcctaagacctatgtccccaaatatctactagggatctccaagttgcttaagcaactagaactcagctggcccaatgttggattaggaataactcctccccttcctccttttactgataataaataaaactttctttcctgtattccttatcatcaggaaaagattccatcaccctatccagttactgagaacagcaatctgggtatcatcctaaattacccttcttgccagcccccaatccaattaaaaatcaagcactattgattatatctcctcaacatctcttgtcttctgtgcatattggaactgccctgtcttagactcacctcatcattcccatcccctaacctctcaactggttttcctgccttcagggaaacaatttctcccacaattcaccctactcattcatgccagaatagcctttccaaaatgtgtgtggtaaacttttgtgtatgtgtgtgtgtgtatacaaatatatatatatacacacaataattacatacctacagtatattttatatatatttgtatgttgcatatatacttcttacatatacacacaatgtaaaatgtatttttatatacattatataaatatatatatacatacacaagttttttacaaataaaagtgtatcattgacattttggagaggttattttatatatatgatactagtatcatatatatgatatgttgtagtatctcatatatatgtgttcctcactttgttgtaatatcatatacacataaaataaccttatatatcatatatgtaacaacctcatatgtcatatatatatatgatactacaacaaagtgaggaacacatataggcaaaatggggacataaaaataagccacataagttcaaatggaattagccaacgtaatgcttaactgtggtagatccccaagattcatgatttcctgcctcccaccctattgtgctgtgttgatgtccttcataatccctgggactgtgaatttggtggattttgctcctatgattaggttgttgtatggcacggttaactttaagaaagagagattatccaggtggatctgacctaatcagaggagtccttaagaaagcagacaattttattctggccagttgtagaagaggaagtcagaaattttcagtttaagaaggattttgtgtgtctactttcttgaagataagaggaactcatgaaggaataggtgcagcctctagaacctaaaggtggctgcaaactgaaagccaggaaagatgctaggacctcagtcctacaattgcaagaaactgaattctacccaaaaagaatgagcttggaagaggatttttccacagagctctatgaaggtgatgtagtcccaccaacaccttgattttggccttgtgagactaagcaaagaacctacgaaggccattctagacttctgagctacaaaaatataagctgaagaacagatgctttcaagctcataagtttctggtaatttgttatgtagcaatagaaaactaatatatcaactcatagttgacactagtttatgtcaatcaattactgagtattgaaagaatggagggatggatgggggggtggatagagattgatatgtggatgagtgacagaatgaatgttttatgaggctcaatgccatgttctgagagcctaatctagtgtagggcatacatttggcccttgacaaagatcgtttgatttaaacatatgatagaaatagagaagagtatgatactctgtgctttgagtgctaacaaataattcattccgtaaaccaagtggggatgtagggtggaaagaaacggagagtgataggagatcgaaaaataggcagaggctgaacacaaaagctctcctacctgatcttaaggagtattagtcttttatttatgagtgcaaaaattctctatcgtaattcttttaacatttactttcaatatctaccccagtatgctttacttcttattgtttttattattgttaacttagtaggttttaaaaattattatatatgagaccctcttgtttacttttataatttaacatttcctttctcactacaaagcaatagattcaataattacctctagctttttatagtcttgtgtatattcctgtctctctgacacaattatgactagtggttggtttatgaattagaaaagttgattaaagaaggaaatcataaaaatgatgcatgaagtactacagatacttcaatttatccctcttgggcatagggccaattcctgtccttgagagtaggttcactgagtgtgtctccagtcttgccccaaccaccccaataaggcacatgtacggttccttgttatggttctttaaagtagctgtagaattcaaagacaatctgaatatagactcctgctagagttttatgatggtttctcccatctgtacatttgtctcacctacccctaatttgaatagttgttaacaaaagatgctatttacttttcatggaaacaattttctatcttttctcaattcctttgtattgatttgtgtagtatttaagcaacagttcatttatatgctatcattaacaaggacaatcacattaacagatttgggaataaaccacctgattcttggaaagcttgtcccataattggtgggtgcagcaaggcacaagcaaagaggagctcattttccagattgagcattcagaatgctgtggctatctgccccggcatttttcagatggaggggggtgtggattaatccactaagatggctgagtgaagaccagtaaaggtattttatattacaacctctgcaattttggttaggtcacttaatctcatgcctcagtttcctcatttgtaaaataaaaagtatattagcacatatgtttgtttattggctagtcaagtggaacagtggtattggaaaaagaacaaagaaatttgtaactgtttgtgatcaattagttgtaaaaaccactgcactatgaccagccagctcccactttaatgggtgtttgtgattgttaaacaagcagtacatgagaaatgtttaaaaacatgtatggcacataataagcattcaaaaattaaaggaaataaaagtaaaataaaatttaagataaatgctattatttataaacacttgaaattattttctgttacaaggtagtaccaatattattgtcaccactgttgtcataattatgtgagaataactagcatattgactgcttactatatgccaggcatgatgggaaacactttgtgtgcattaacagtcatccctcagtatcaccaggggattggacacaccccaccccataccaaaatccttgaatattcaagtcccacagtcagcccagcagaatctgagtatgtggaaagttggttctctgtcttcctgtacttctgcatctggcaaatactgtaattttgatctgcatttagtgcagatgcagaatctctggagatggcaggccgattgtatttactgaaaaatgcccacatgtaaatggaccagagaagttcaaactccctgttattgaaggtcaactgtatttcattttgcgatttgcccaaggtcacacagctattaagtggcagagccaaaagagaaagccaaccattttgattccagaatttctgctttttgtctgtttatgctattccttttccaaaaagaatttcaaatttgactcacaagaatatattgaacatagtaacataccataaattaaaaacaaccactaccaataaaaacttagctccttttaataccttcatacatatatgtatatgaagttttctgcttaatgacaattcccaaatctagtcaccactaaagtaaatttctattttataattagaaggcatagtgttttcccttacataaaaatgtctgaaatccatagttgttacatttcttatcaggaggccaaattcactactcagtctcatatgccatcaactgtaataaaggcaaaagttgtcacaaatacacgtagccattaagaatggagtataaaccaaaatcaaaaatctagttcatcattatgtttattcttcctaccatggaggctaatgagaggaagccctttagttttgactcttgtctaatctatccaaccctttatccagtgatgactttatgttttttgccatagatactaccagcctgggcaccacatcagtatggaaattaaactggcaatccagaacacattgatttatgaggttgcatttctcccttacattttataatatttttgagcaatcataaattaaacataaaatcaatttcaattaaaagttaaggggccgtagaccctcaggtggatgcttaatggttagttttatgaaatataaaaaatactaagctttatacaggtgttattattatttaatatttcttacacactaacaacatgccatcaatttatatttactcaaaacccaattacctaatttttgaattatgtagcctgcccagttctgcaattaaacatttggccatttatttcattctaattgttggctcttcaagataaaaaatgttaggagaagaaaaattacattgttgtattttagaagctctattaaaacttagaaacagcctcctcattgggaaattattcattttcaattattcagactttaaaagtcctacatttggagaacattgcatggtaagagaatgtttataagacaacactgtgagaaagatgatgtgaaacatgtccataattatttacttgcattatatatctactaatttattcaatacaaatttattgtatttataatacatgcattgcattaggaataaaacagagaaaagaaaaacaacagttatgggcatgccttcatgacacctgcattctaaagagagaaaagtaggcataaacaatgaattagttcactaaaactaaacaggaatactttctagtgcttattgtacagtagctaccattctaactgttctctgtgtattagttcatgtcatcttcccagcaaccttataagaatcatacagtaattatctgcattttatagaagtggaaattgaggctcaagggtgttaaataacttgtccacatctaacagctgggatgtgatgatactggggcttggacctagcagtctggcatcgaggggtagacgctatatcatttggttattctgcctttccaatgcggtgaattattataaaggggatgaacttggcagggcacaggtagtgtcagagctgtgtgaaccaaagcaactccatcttaaataggagctgggtaaaacaaggctgaaacctactgggctgcattcccagatggtaaagacattctaagtcgcaggatgagataggagatcaacaaaaaatacaggtcttaaagaccttgctgataaaataggctgcagtaaaggagctggccaaaacccaccaaaacccaccaaaaccaagatggccacaagagtgacctctggtcatcctcactactacgctcccatcagtgccatgacagtttacaaatgccatggcagcatcaggaagttacctatatggtctaaaaaggggaagcatgaataatccacccgttgctttgcatgtcatcaaaacataaccataaaaatgggcaaccagtagccctccaggctgctctgtctatggcatagccattcttttattcctttactctcttagtagacttgctttcactttgcactgtggactcgccctgaactctttgttgtgcgagatccatgaatgctcttttgggatctggatggaaacccctttcctgtaacacatttctctgtcctgtaacagtagtgccagggagatcaagtaagattttctctagaaaattacaattggaatgatatatataaagctaaataggaattaactagagattgatgtagacaggtagcagatgctgacataggtagaaggactcaaatgtgcaaagaggctaagtgagaagagtgaggggaattagagcaaccaagagatatccagagtggctgaagtgcaggcaatcaggagcatgggtcggtagagctggaaaaaaccctaggaaaggcctgctgggtttggctacctctgatttcattctccatatattgagactctctttacatcaatgaatttcaaacttggctgcaattagaatcacctggggagcttttacaacacctcaacccaggccaattatatcaaaatctctggaggagggacccaggcatcagtaggttctaaagacccccacgtatttccaatgtgcagccaaggttgagaaccaatgtggcagatgatcctcagactattgcctaaattagcagaaatctctagagccaaacatgtgaacaatattattatgatgatcaaatgtggttttaaatttcgagtacgtgttatttggtgaagtaaagtggaggagtatctgactcaggcaaatatcagttgcatgaatcctcaaacaaaaggaaaagtttccagcttaagtgtgggacaactgggtggagagtacacattctctggttgtgctgacctgaaatgttctaactccctgggcgagagaagacaagccaaagtcttaggatgaagcatgcctttaagatagggacctcccttccccacagtgctccatccaccctctgggctaaggagtagaggtaagtgggtgaggatggaaaaaaagcaagctctcgagtttaacctgaaagtttatgttccatgggcatcactgaaaagaaaagaactaggagagatggtgacctgtcaacgacctgccttgagggagagtttaatcccggtggctgaatcagtcaggaatctttgggaaacaaattaagacattcagcaactgaaagaacgaagattatgggccaggtgcagtggctcatgcctgtaatcccagcactttggaaggttgaggtgggaggatcacttcagcctggaagaccaaggccgtagtgagtcataattgtgccactgcatgccaaccttggtgacaaaatgagactctgtctacaaaaaaaataaaataaaaataaaaaaaaagattgtgatgcctctttccaaaataaataaaatgtttattttttcaacattacacaaaatttaagcatatgctgacggtatctgactacaagaatctgaatatttattaagctgaactctctttctcttctcttcctcctcctttctctttttcaatgccacttgataattcagtagtggaataaagggccttaaggtaaaggtgggattaaatatgttttacagggattttgaagaaggaataaagaaatgcataaatagatatcaaactatcagtatgaaggctatttctgcagaccaggtgagataggaccgtagctcggagtagagcctaatggcagtacagaaggaaaaaatggaaagagagtaagatttggccataagcaacaatgatagctaaagcaaaagggatgatgacagataagtgataagagagataaacatagagatatcaaaaaaaatcttgccagctaccactactgtttctactttgcctccaaattacattttcaaaatttattacctttttatgttttaaagtgagtgactaataatggaataatcaaataaatatgtaatatatatcttattaagtatagaaaatagtctggaaaaaatactcccaaatgttgagagtgattaactctaggtggatggtatcactggggtgattctaagaataaaaatagtgaatgcatgtgagcatatgtgtgccaggaaaatccttgtacttttgctcacattatctgtttaatcctcattttccagggtatggaaatgtttcatggaactggtacataaaaaagaatattgagtatttaaaatatttttaaatatattattaaaattaacataatattgaggtgaactaaaatcacaacacagtttattacagaataaaacattgcaaaaatgactataatagttgctaaacatttattatgtaccaagaactgtactaggtgttttacaaatatcaactcatttaagtaaattctcacaattcattgaggtgaatactatagtcatctctaatttcccatggtggtggtggggaagtatatcttagacagattaactatgtgcgataatgactataatagttactaaacatttattgtgtaccaagaactgtactaggtgttttacaagtattaactcattaaattctcataattcattgtggtgagtactataatcatccctactctgccagtggtggtggtggggaagtatatcttagacagattaagcatgttttacgtagtcatatatttgtgtgactctaaagactctgaaattcaggagagaaatgcagaattcagtgttttaagagctagagccttactctccatcatggagatttccaagaaggctggctgccttttttcaaacagacggacacatagcattacaatatttcaaatagttaacatctcatttttacaaaggaggttgtaatcctgtgttattcaagttatatgcttaggtctaaataacaatttccaaacattttaccaactgcaatcaaagaaagaaaaaacaataagtttatttgattgtggagatgcctggaaaattttcactgaaagcaaaatatagccattttaagttgatagttttattatccacccctcagttctaccataggctttcatttatagtaattgaattcaaggaggaactaagtctgaatatcaaatggagcaaggaccacatgttgaaagggaggactttcaggctgcttatcaaagaaatgttcatataaatataactaaccttaaccactcagacattaaagttaaggcgctcaaatactcacctgggcttttgatatttttagagcccaatatatgtaatcagtgataaatgatcaggtcctaatagttgtatcatgtaaataagccctcctaaaaatattttcaatgcagtttattccaaaatcctcctcaccaaagtgatttgttcattgtttcagttaggaaaaacaaaatttatattcccataagaaaggaaaaatatatactcttatctcttgctctcgtatacctaaaatgtaattttggggttttttttttgttttgaaaccaagatgagaataaagttgcaatggccaatttttaaattaacacagttattttaactaactcaacaccaagcaaagaagcatttttgaaacttttaagtactttcattattttcttgacttaattctagagcctagaaagaaggaaaggaattatgtatttttgttgtctttactttttgaaattagacacatgcaaacacctgaataagctatgaagttcatatacctctttcccaacatgggaaaattgtgtcaagcagtgctgaagcaataaatactgctctaagaaagaaataagatgcctatataaaatttcatttaaaaaagcaaatgatttcataaatgattgtcaagattggaagttggattatgtggcagttggaagtcagacttgttccttagaaaattagatacattaagatgtgactactttagagttaagcaagtgtacagaagaattactcttaacagaatttttgaacagatggatttttgtttggaaatctaataaattttgaaacatattgtaacatgtaactctggaaaaagaacttcatcaaaaatccatggacattgccttgttagaactttacactactgacagaacaaggtaaagagtaaaatgtccaagcaacattttctttaccaatgttgagctttcatctctggacaagcatatagttcatttcacaactgttctttgtatataggtttttattttgtctctagggctattttgttgtttattaaaatgagagaccaagtatcattctctctttattttttatttttttttttttttgagacagagtctcgttccgttgcccaggctggaatgcaatggcacgatctaggctcactgcaacctccacctcctgggttcaagcaattctactgcctcagcctctcaggtagctgggatttgcaggcatgcaccaccattcttgcctattttattttattttatttttttatttttagtagagacggagtttcgccatgttggccagcctggtatcaaacccctgacctcgggtgatccacctgcctcggcctcccaaagtgctaggtgagccaccgtgcctggcctcattctcattttttaaattaattccttttcattttacctagaaagcctggtatctttgtccaggctgcttgggctgctatgaagaaacaccacaaactgggtggctcacaagcaacagaactttatttctcacagttttgtaagctgagaagttcaagatcaaagtgcctgtagattctgtgtctgattcatagatggtgccttctcctcatgtcctcacacgatagaagaaatgagggacctttcttaggcctcttttatatgggcactgatccattcatggaggctccacctccttaatctaatcacttccaaaggccccacttcctaataccgtcattttgggagtgagaatttcaatatatgaatattgtgtgaccatgaacattcagaccataaaatctagtaacaggatttgttctatcaccatttaatttacacaaacaccaactgaccaaccaaaggaaacaggtcagttgagtgtataacaattaactgttggtctgtgtctgtaaatcttgtgtttgtaatgatttggtcctggacatttgaagatatgtgaaaaagaagctagagattatctagtccaatcttttcattgagtaaattagcaaagtaaggccaaaagaagctaagtgacttgctgtggtaggcagaatttcaagattttttttacctccctgttgtacacatcctgcataatccccaagaccgtgaatatgatggattttactcttatgataaggttatccatggatcttaaaatagagagattatttgggtgggcatgacctaatctcataagctctctaaaagcagagtttcctcagcttgttgcagaaaagaaagtcagagatttgaaggactatatggtttcagtgaattaatgccagcttggagagggagggagccatgtggcaagggatgtgagaggcctcaagtacctgagagcagcccctacctgacagccagtaaggaaacataaactttactcttacagctaaaagaaaatgcattctgccaacaactaatgagcttggaagagaactccaaaccccagaagaggcctgtcacattggctaacaccttgatttccacccactgagaccttgagcagagacttcagttacaccccacccagacttctgacctgcaaaactgtgagctaatacatggatggtgtttcaagcttctgtttgtaaaatattgttccccagcaatagaaaagtaatacatttatctaaaatcctattgttgataaatgagagtccaagatctcctaagacttaaaacaagtcttttatctcctgctagagacagagataacaaacagtgatttaagaatgcatttgatcaagcaccaaggtatataatcaaggtatagatgcccattgggtgaggaacacccaaactactattctttaatcaataagagaaggtaaaaactgagatttataattggtcaaacattaattctgaataaaagaaaactatttcagagaaagtggaatgtatctcccactaaattgcatggctaggagttaaaaaaaaaggaagctactcctccaacattttagcctttcaaatctggtggtaccagctagaaactaacaggggatatttggtctcatgtaccccataaatacatacatctactatgttctcacaaaaattaaaaataaatttttaaaagggagtatttggtgaacagaatatgagctccgaacataatcttgtaaaggcatccttaccctatcttactcaggtaagatttttgtgatgtaagatttttgtgatgttcaaaattttccatcccattggtgaaattactctgacgaaaagagttatgatttctgaattcagaataaaccaaatttccttagttattcatcccagttagagaagttctttcactctctcttctttctaaacccaaataagaaattacttgctcaaagggaaaaaggactcaccaatatttgtatctttctcagtgtatatgaggcctggagtcatgtatgcggcgatttccagtattagttagtaccaatttccatacatcagacagtgtgaaaaatcatgtaatttctaccacacgcatctaaccattgtgactttgctgatgagggaaatagtggcttcatctttcctgtggcatgccatctctattagacttcgtaaactgcagcagttgaaatctttaaccagccattactaataagcatatgttaattgttgcagagatcataagcaggtcaattaggaggcaaagactggaaccgaaggaaacattcagctagagggaaaatccagggcaggtgtcggccagcatggactgccctggcgggagctctaagcatcttgggtagaagctcatttaacgttttgatttgctgaatttgcatttcaaattttcattcctaatagacaatatagtcagtctttgttaatgaggactctgattacatgtgccattataattgggaattagcagaccagccttgttttggagattaaacccaaagcaaattggattaaatacggtgtgactgaaacctcctctctctccctttttgtttttttttcttgagtcaaaggtgaaaagaaatccattggttccaggcatatggctcctaactttattatcatttttagagcgttgattatactttaaaagatagccttctttggcagcgttcatttatagctttaaaaacttgtttattaaatttccttccataaactgaggagatttaagagcagatcattaaatacttggaactaattatagaatacacacatgtatacaggtagatttgttatatttttatgcagcatactatatataaaaaagcaatgagggagtaaccctttaaaatgagctttaggtaaaagtgtacaactcatcttcacagcaatattatttgaactcattgttttataatctagcaaatctgtgacatttgctctaccagatgttagcatatcatcttaaatgcaaaggtgaaatacattttatggtaatgttatcagttcacaaaaaccctttttatcattttatcgtgacaattacaatgcaatttttacattttagactgtaaatatcataacccttaagtgacatatagcttagggttatgtggtctttctttattctcttgggtcatttaatattgtaatccagttacactccaacattttcattattaagctgaagaccagttcttcaaaaactatcactaatcccaagacatcggaaaatcatgcttattaattcccatgagattcagttagatgtttgtttggctataggccaccttaattacacaacaaaagaagatcttcacaagatgaagagaaattcaaatactttctgagtgcatgttggtctttgaagacacacaaatgaggttagacttggatattaataatcaggtacactttttcagccataaaaggttaacgtgtggagaaacgaaggaaaggagaattttacatggggatgtggtttttattccattgtactgtgtttacagaggaaagtaatcttggtggaaagtagctatgcaaataaaggttaaggtaccatgaccttacccacctagaaatctcttacaatggaaacaagagaaagtggtaaagttttctaggaatgtgaaatctattataggaggatcaggaattgtttcttcagggaagcttgttaattctgtaatcgctcaatttcatatgtatcacctagcccagtgcctgatttgatgagatgggaaaggtaatggcagcttcagagacacaggtttgccttgaaaataaatgagttcctatggctatgtgtaagttcttttctttctgatggaaaaaaaatgacttgtttcagttaaactaatagataattgctatttaaaccatatatgagtttcagagttttttttaacaagggcagaatgtcatataattaacattgaatttgccaaagtgctatagtattattaatttgaagttttattccttaagttccatagaagtgaactgcattctctaacaccaatgcccaacacatgaatgagttaagaatctcgagtgttttggagttatcaaatgataataaattatcactgtcaaagtttaacattactgactaataataattttcctttatcagataacaaagacaagacaaaaggatgtctgggttatacatttaagtttgctagttttatatatttaattatattcaaaattattttatttaggctttgattatagctaacaccggtaaggataataacttactagtatctaaaagagtaatggcttaaaatggtttgatggtcacaaaaagggacaatttgcttctcacttatcctcaataaatttgctgaagtaagaatgtgagatatttggaaattgaaactgattttaaatcttggtaactctgcctgatgaattcagtaaatgaagttttggcatgcatgagtattattactctttttatctttgctattttgagatattgtttttattttagaaattgctttttgtttttgtaaagaaaaaaaatgctcatgccaaaaagtaaattcaacaaacaaaagttcaataaagaccataatattcaaagccccactttaaaaacttacttacaaagtaactaaaggttactttaacatctttaacatttcaatgaacaactttcatcacctctctctatagatacacacatatatgagtatatttataatattttacataaaatgaatcaaaatagggtgtacatatattaatctctaacttgatttttatccatataggataaaatctttccatgtcaaaaatgaatatctgcaacttagaagtatgacagataatatttatcaaactagactgaaggttgtgacctattagtaaattgtgaaattagtttggttaaactcatgtaacattttataaaggatatagaatagacaagaatgcaatgggatgggaaaatatcagagtgcactgtatgtagtaaaggtaagagttttttcatgaaatttgtctcaatagtgtggctatgcctatacaagcatgtgctatgtcactatgtaaaatgtatttcatactgtggattgcagtaaaaattaagtctgagggcacagctgatagagggtagaccagggaacttttacaaaccaaatacctactcatcgccaatgttggcattatttccacaggagcatggacccgtcttcacttcatcttccttctctccccaccccatacgctggtgtagtcaatcatttttattgatggcttgtattgttggtggtatattttggcaaaacaaacaagaaatgaagactatgcaataaatggctaattcaataggcttaggggttgcttattttaaaggttttctttactggcccttgataggcacctgatatagaacctgtgagcccttgaaatgtcctcaccaatgagtgtctttgtatatctgagaccttgggccatgccagacaatttatgctagcgatgtgatttatggcgcatacccatttttgtatgcctgaggctttggaccatgtatcagtttgacctgtggggggctggatactgagaagctagggctagtcctgtgggtgcttcaccaattaaccaccaacgaaaaccctagacagaaaggctcagctgagcttccctggtcggccacactcacatgtgttgtcacatatcactgctaggaaaagtcagtgctgcccatgagactccactgggagagaacaactggaaacctggacctcatttctcctgggtttggccctatgcacctttttcctttgtagattttaatctgtattctccttttgctgcaatcaagtataactacgagtagaagagcttttctgagttctctgaatccttttactgagtggtcaaactttagggcagtcttggagaccccacacaacaaaatagtaattagcctcactatttttaatggccacaaagtatcctgtggtatgtatatgccataatttattttaccaatccattattgatggtcatgaattttctgtattatttttgcttttgataatataaataatcttgtatctacaactttttcaacttgttgaagttattattcctatcatatctttgcaaatgtaaaggcaaaaatatgtctcatctttactttcattttcttgattgtaatgaggctgaatatctaatcatgtttaatgggtctttatatttcttcttttaagaattgtctattctatgtgtgtcacccattttttattagagtacatagcttttaaatattgatttgtactttaatttggatgacttgagtaggttagtgaataaacttgacttataaaatattttaaaacaagtgtagtcctattgttcctaaatgctacagaagtgtgcaagtaggactcttgccaagactatactgaggaataaaagattcacatacatatttgtatatattggctgctttggaagtagctaaaactgcctagttgttttgtttaaatgattcattttcttggcaaaacttttcttcttattctaaggtattgccaaataacattcagttccggtttggtcaaagcggctttctaaataatggcatttaacaataaagtggcaaagagaaaaagttatacaactgttacacactttttaaaataaaatgagtttgcatgtatccacaccttatacttaagaactaagcaccaattgttctttattcccaattaaaaagcaagctcatcttagtcaaatgcattactgtcaggttcactgagagaaacttattgaatgccaggtacacttgccgtgtgtgccaaacatgtacatacatttaatttaattttctgtataatagatatccatggcaattggctagtctttataaatgagagagagagagagagagacaacaagcctgctagtagtgggctgggtacttggggacgcacaaaaatctttaaagaccctgggtcaccattaatgctagagaaacaaagaataataaatgaagtctttcagcattttttgagaggttttttttcctctcttacataaatatattactctatagggactcaactattcctcatactccttctgaaatgggggcagtattttataaggtgggacatattactgcaaattttaagtattattattgctgttgctattactattagaaatataagtagtagattattgttgtgcttcaagtgttttcacatatattttcccattattaaatggtcatggctttagctcttaagtctcttttagcagtatgtaaaggcacttaggagaagagcataatcagtcaatacgttggcatatttttaagtaatttagtttaccaaaagccttcacctctgtgattttgcttccctcttctgaggcctttctggaagtctctgtaacctgaatttttagggagaagtacatggtgacttagagaggttacttgccatacacagacttgcaattggtacagtaagtgatagagttgatgttcttgattcatttattcatttattcattcaggactcttttgaggccctgggatgcatcaatcatcctgataaatggtgaagacaatatttaaaatatatatggcctgttttctttaaggatgtagtttagcagaggcattttgcatgaaatcatataactaaaatgcattgtcttgcgtggtaacagaaagatgaaatgctgtatagctcagaggaaggaatgattacttttctgggatggtatggagatgatgagaaatgtcgagcaggattacaatgctcagagtgttcctggtgtcccacaaagagaccacaggatatctcagaaagagcccaggaagaaagcctgcagctgttctgaggaagcaagctaaaactaattggtaacattccatattccctgtcaccatcttgaaatatatgaaaagggatactatcactctgagaaaaagtcattacctaaacagtgaacctaaaatatattctcacactgggtgggatgaacacatttaaattttttttttaattttaaatgtatattttaattagacgtttttactaagcacatgacagttaacatccatgggacaaagtttcaaatgtagagataaaaagttttaaaggaaattaaaaagcacacaatcttgccataggtatataggcatttttttcttcttatgtgtattatttcataagtaataatttatttgctcttttttatattgacattgtaaattagagattttcaaattttatttaatttgacataatttaactattgccatgttattgaacatttctcttgtctatatagattttcctgtttataaatgatgctgtttctaagatcttttttgtattgctttctcctgttatttcattttatttacctagaatattgtcttcctaaaatagattaccagaaacagaattactgggtcaaaggtgtaccattttttaaacatttgatatacattatcaaatttgtccttcagaaagcttgtgccagttatattcccaccaatattgacttgtttgagcttcagtattttttaatcaacttgtgtatcattacatattaggaagagtaaccctctacagtatttactctagatatttttctctgtttattttcttttattacagtatataatgtttctaaagcagagattttaaaagggtcaagcctatacatctttttctttatatgtatataaatatattttaaatttcaatactttgagggtacaagtggtttttagttacatggatgaattataaagtggtgaaggcttagattttagtgtacccatcacccaaatcatgtacattgtactcaatatttagctttttatccctcacacccttctcaacctcctcaattctgaatagccagagtccattataccactctgtatgcctttgcatacccatagtttagctcccacttataaatgagaacatatggtatttggttctccattcctgagttacttcacttagaataaatgccctccagctccatccaagttgctgcacaagccattatttcattcttctttacagctgagtagtattccagggtgtatatgtactacattttctttatccactcattgtttgatgggcacttatgttggttccatatttttgcagttgtgaattgtgctgcaataagcgtatgcatgcaggtgattttttgatataatgacttcttttcctttgggtagatatccagtagtggaattgctggattgaatggtgtatctatttttagttctttgagaaatctctgtgctgttttccatagaggttgtgctaatttacatttccaccaccagcgtataagaattccctttcatcatatccatgcaatgtctatttttttacctttttaataatggtcattctggctggagtaaggtagtatctcattgtggttttaatttgcattttgctgatgactagtgatgtagagcatttttccatatgcttcttggccatttgtatatctttttttgagaactgtctgttcatgtcacttgcccactttcaataatttttaatgaaattatttgtttttttcttgctgatttgtttgagttccttgcagattctagatattagtcctttgtcaaatgtgtagtttgcaaatattttctcctgttctgtggtttgtctgtttactctaaagattatttcttttgctgtatagaagctttttagtttaattaggtcccatttatttatttttgtttttgttgcatttggcttttggggtcttagtcataaattatttgcctaggacaatgtccaggagagtttctcctaggttttcttctagaatttttatgagacctatacaccatttttattgtggttttatttttccactattgttttttaaaaagcttataatattttttttccagagaaagggtttaatgatcacagtgcagctgagcaaggagacgggaggaacccccaaatctgtctctctgaggagtttttgggctggggtttttaaggggattacggagagccaggggtggaaaattggggtaattgattggtcagggtaagggagatgaaatcatcaggatgtggaaactgcattctttgttgagttagcttctcatgggatccttcagaccagctggtgtcagttagtttcaccacgatgcaggacccaaaagaatacctcagatgaaaaacttaatgtttcacaatgtttatctataaagcagttaagagaagagctataatcttgtaacagggtttatgtgattctggggcaatagacaaacaactgtaaggaaacaggtcagggagtaagctgacctaatcattaacactgagtgtgctgcaagcttgctttattttcacttatcctgattaattttataaagtttataggattggtttcacaattgctggattatatggtaagagtatgttcagtttcataaaaaactgccaaactgtcttccaatgtggtggtacaaatttgcattcccagcagcattcttgttactccaagtccttgccagcatttggtgttgttagtactctggattttggctattctgatcattgtgtaatgatatctctttattattattattattattattattattatttgagacggagtctcactctgtcacccatgctagggtgcagtggcacgatctgggctcactgccagctccgcctcccaggttcacgccattcttctgcctcagcctcccgagtagctgggactacaggcacccgccatcacgcctggctaattttttgtatttttagtagagacagcgtttcaccgtgttagccaggatggtctcaatctcctgacctcgtgatccacctgccttggcctcccaaagtgctgggattacatcattattgtttttagttgcattttctgatgacatgttgaacaccttttcacattcacagacttatctgcagtctgtatatcttctttggtgaggtgtctcttaaggccttcggtccagtttttaattgggttgtgtgttttgttattgctgagttttaaaagttctttgcgtattttggataatggtcctttatctgatagttttgcaaatattttctcccactctagggtttgtcttctcgtcttcatgttagtgacttttgcagagcagaagattttaattttactgaagtctttcttggatcatgtctttaatgctgcatctaaaaattaattgccatatcccaggtcatataagttccttcctatgttatctttcagtagttttataatattgcatttcatatttaggtctatgattcatatgtagttaatttcttataaattttgttaatttttactttgcataaagcacatattcctctacataatatggtgagcctcatccagtcagttcaaggccttaagagcaaagagcaaagttcccagatgcagcccctaaaccttggacttttcagtgtccagaactataaaaaaataaatttaccttttttttttttttttttgacagtctccctctgtcgcccaggctggagtgcagtggcgcgatctcagctcactgcaagctccgcctcctgggtttacgccattctcctgcctcagcctcccgagtagctgggactgcaggcgcctgtcaccacgaccagctaatttttttatatttttagtagagacggggtttcaccgttttagccaggttggtcttgatctgacctcgtgatccgcccgcctcggcctcgcaaagtgctgggattacaggcgtgagccaccgcgcctggccaaatttaccttctttaaaaattaccctgtctcaggtattcagttataggaacagtaaacaaactaagcacacaaagaagagatcttgcgagcacgcagagagaaggcagccttctataagccaggaaggaagtcttcatcggaaactaaatttggcagcaacttgatcttgaatttctcagccttgaaaatttagtcgtttattacaaaggatactttaaacaattcaactaaacacagatgaagaaatatataggtcgaggtctggagggggccccaagtgcaggcaactatgaaagattttcaaacagacttaagagctccaaatgtctccagtgtcaataatatgggctatagtagggactgctacagcaatatcttgcttctataagtcagaatacactgatcagcagctgaaattacatgctgtgagttttagcacataagtcttctggaaggacaaacattttaagtgattttaaagaaattaacatacttgactttccttatttttttgtataatacaataaacaatctagatttttaaaaatatacccaaaataagataagagtcttcataaactgcctgtaatagtttctacttttagattggctagagtgacatatgagttaaaaatcattgaacagcatatacaacagtggactcgactgtctctttctttctttctttggacaaattttatggaatataattatttaaattgtgttaaaagacccacatgtgttccaataatagaacactaggcataaatgggctaataaaagcttatgtttcctggctaggagcaactcgagttgcctgtattatgaagtacccattcacttaatctcatcatttttgttggaacagaagttaggacaaaaaataccttgttggcttgtcagtgtctctactttctccagatgctatttggagtgacacgttggcagttgttcagtgataattctaaggcggccagagcagaaatgaagccagattgacacagacttcaattgacgtttgtgatactagatgctgtgagagacccttttctcagccaaacaacaaatgtaggacattaattcatgaactgtggtaaaaagactctaaactccaaattcgtttgacaatttcccttttatatcctggtgaacaaaatggagcatgcttgactgaatacatggatactttgggtgagttgggttagtaataatttgtatgatgaaaatgtattctacgtaataattgatatcagtctagaaggagattgattttgttcaacatttttatccatgactctgatgaaagtatagaaggcttactcaacaaatttttagatggcacaatggcttttgtatttgattacagcttcaaatagaaaaagatatcaacaagctacaccaatgatgtaaaatctagcaagataaaatataatgggaatgaatacaagattctatatggagactccataacacatcaactatagatgcaggatttaggaaacagtgtggcagcttcagatggcaacagtggcttggcagtcaccccctctgtcctatttaagtgtcccacctcaatttgagataacaacattgcatgactcctttggaattttatgaaattcagtcccttttaataggagtcaaatatcagaaacaaacgagatgacaatttcactttagccttttaagatatttgacttttaagactttgactaaggcttcccatcccaaaagactcctttaagagaagttacacaaactggaacttgttagagagtaaacaggaaatgagtgggcttaaagtcaaccatggagaaacagctgaggatttcatactttgccttcaccaactggggaagttcctcaattgtttttgtttttcaaggccttgaaatcttcgaagaatattggccagatatttttgtagaatggccctcagttgggccttgtctgaagttttctcatgattaaatacaggcttgtgtatttttagcaagtattatacagccatagcatagtaccctcctaggtgcatcatatcagaaggcacatgatatcaacatgctttcttaatgatgaggttaactccaatcatttgttaaaggtaatgtcttccaggcttgttcactgcaaagttactacttttccctttgcaattaatagatatcttgtgtggtgatactttgagttatgtaaatatatcgtttctgatcataatttcacacactaattttagcatctattggtgctttctgtttgcaacaattactgtgatgtatctgtcaagtcaaatggtgatttcccatttgcattatttctttcacacttattaattaaaatcctaccatagggaagggctgccccttctctactgaattgttggttcgacaattttttcaactgatttttgtatctatatcagtataagtataaataagtatagtaatatttgctttattctttgagttataattcacttttctctagatttgaccatgaaaattacttcagattggctcctgtgtcccttcaaagtccttttgacatatgtttatcattttttaagcacttgcttaatttctggcactacacgatgctcctggcttatcttgttttgtttttcttttccttgtcctagtcctggaaagtcatgacgcattttatgatatcagcaatttctccaagaaatccttgtttcccttattggaaaatgtcatttagaaacgaagatctgggtgttaggtgtgtttgttccttctgaggtgtcatttcttctaggcccccttagcataaagaaccgggaaatataagtatgtatccacacacatgcacacacacacacatgcacacacatcaatttctatatctgtctacccgtacatattttagaaaccatgagttcatatcgatacgtctcattccagtccaacaccagagggctgattccaaccttgtctcttcccttatttgtaactctttatctgacaacgaaaaacccagacctcattagccacaatatatttacacatttatttaattccagattacatataaagtagtctcagagtcactaactcatacttctgtgaaaaacaaatttaaaaactattgtccaatatttgagtacagttctttttgtcttttacctttatgcatattgtcaaaagattgttttccaaattgacttggatctatttttttattccctacccacttcaatgtggctttgctatacatttgtaatgccgttagattaatttgttactgtttacattacacttttggttcctccctcttctagttaattttaattatttatttttatgcacgtgaaacattaacaagcttctaaaactcagaattataccaaaaccgcatgtactcagaaaagtgtcattctcctcttatcctttctattctattctcattcctccattctttcctccatacttcctgtaagtaaccagtctcattacttctcatttatctttactgtgttgttttccacatataagctgatacacgtttattttcttattttcctttcatgcttacataaaaaattagcctactacagatgctctttgcacttctcattttttacttatcaatacatcctggaaagcattccacatcagtcatagagctcttcttcattcttttttacagatgcctcgtattcccttgtacaaacgtatcacagtttatcccaccactcttctatgtatgggcatttaggttgtttcacacattttataattacaaacaatgatatgattaatattcttacacttttattgttgatgcaattaaaaactgtgtactgtgttttatttgtttatttagaatctgtgttttattggaggtgtaattacagtgtaaattcctgtaagtgctattgctgggtctaaaagtaagtgcatatgtagatttttaaaatatggccaaattttcttgcatacaggctgtaggtatcactttgccttccctctagaaatacatgagaaagtacctattttcccacaaacttaccaacagaatatattataatgctttttaacttttgccaatctgttaggtgggaaataacatctcagtggtgggatttttttttttttttttttttttttaccgagtttcactcctgttgctcaggctggagtgcagtggcatgatcttgactcaccacaacctccgcctcccgggtccaagcgattctcctgtctcagcctcccgaatagctgggattacaggcatgcgccaccatgcccggctaattttgtatttttagtagagacggggtttctccgtgtttgtcaggctgatctcgaactcctgacctcagatgatccacccgcattggcctcccaaagtgctgggattacaagcgtgagccaccgcgcccggccctcagtgttgttttaatttgcacttatgtaattatgtgtacatttgaacatctttcaatagtttaaaagccgtttgataactttttttgtgaattgtctatttatggattcattccattcttctattgggttttgggtcctcagtatctcaatctttaagagttcttaatatattagggatagcagacctttgtgatgtatgttacaaatattttcttctaatgtcttaatggtcttctgactttgtttctggtgtttttgtcatgagaaaaagaaatctatggagtcaaacttacttatcaactatcttttttactgccagatgttgagtcatagttcaaaaatattttcctatccctaggttgaggagaaattcaaccatgaattggtctggtattgatatggcttcatatttcaaatttttatagatatggagattattcttataatatgaggaatagatctaattttatttctaaatggctactaagcaccattatttgcaaaatttacctttgctcaaatgatttcagctacaatctttaatatatactaattttatgtatatacttggctttatttctcggttattttctgttccactcatgtgtttgtcttcttatgtgccgatataataatgttttaattacagagacttatagtatgttttaatgtctggctgtttttctttgtgtgtttttctgagcattcttccatgtttgttattccatataaactttggtatcaatttgcctaataaaagcttcaacatagagttttaatctaagtttgatagctatttggagacaaagtttacttcaaactttttaacagccagatctgtccaaagacagaatggcgttcgcatgggtggagatgtttaagcattgctaggctggactagtgcttttctgactttaacgtacacatgaaccacctgaggatcttgtttaattcaatcacccaaagatactatttaatttaaccacctgagggtattgtgtaattaattgctatggtacagatggaataacacaccaatcactggaacccatgggcacattcattcaaagccccatagttaatattgggagcaaagtcaatatagcaagaatcccaatgaatataaatgtacatactgttaagctttgttttgtgccactattttctttattcaaccagaaaatagagttgcatgaattttctttttttaatgatgatattttgaattgtgttctaagttttgtgtttgtaaccaatattgtactcaatagataatttgtgtttttataccctatttgggtgatgattttactagaaccattaccattatacaatatatctatgtaacaaaccagcacacatacctcctgaatctaaaatacaataaagtaacaaactactactactaataataataataaataggctagagtctactacattttggcaagcagtcactgattctccttgtatgaagaaaagcattgagtcatactgagcaagcctaataatcctaaaatattctgttttgaggcaatatacttaatatgaaatatcaaataattttaaaacaaatttagccctaattcatgtatcacaataattcttgggaagatgctagaatacaattaccatgaatgttttctttcttttttaatgatactttaagttctgggattcatgtgcagaacgtgcaggtttgttacataggtatacacgtgccatggtggtttgctgcacccatcaatccaccatctacattaggtatttctcctaatgctatacttccccaagccccccaacccctgacatgcccccatgtgtgatgttcccctccctgtgtccaggtgttctcattgtttaactcccacttatgagtgagaagatgtggtgttcggttttctgttcctgtgttagcttgctgagaatgatggtttccagcttcatccatgtccctgcaaaggacaggaactcatcctttttatggctacatagtattccatggtgtatatgtgcaacattttctttatccagtctatcattgatgggcatttgggttggttccaagtcttcgttattgtgaatagtgttacagtaaacatacgtgtgcatgtgcctttatagtagaatgatttataatcctttgggtatatacccagtaatggaattgctgggtcaaatggtatttctgtttctagatccttgaggaatcaccacactgtcttccacaatggtggaactaatttacactcccaccaagagtgaataaccgtcctgtttatttgaaacctgtcagaccttaagtcccacagaaaaagcgaagaactcaaataaaaatatatgacctgaaatatggtgacaaagcaaatgagctttgaaatcagaggactggttttaaatccaggttttgacattctttgaacaactctgggtgattttcttgacccaaactctaatgttttcatctataaaataaagataatcatagaatgtactgtctaaggctattggtaagattaaatgagataatatctggaaagcacttagcagagtattccataagtggctgcttttattactgtaacttcttgctcatttggggatagacccattgcacagatccttcctcttcagattgtttcttgtgcccatttgatgaggtcctgttatatatgaaggattaagcatcattgccttggtaggaagtcttgattgatcaaccatagctctattagaaatatatgagcttatgatttacactagagatccccagacacagccaatacagcagaactttgaaaagcaaaagctttgtgtttcatacatttagatctttatcactcttattttaatctgtggcatgtggagtacattattttttctaggctttcattaagcagattactaataagaaacaaaatcttatcatcttagaacatgttttgcagccactgcttatgccaaaacatccatggattagttaagaatgccaactagctgtccttaggttttaaagggtttttctatcatagtactatattatttctttagatgacatcgatttttattctctgttctgtgaagtctgatacataatgcatactagcctcaaagaaagcacccaaaaagaccaccccaacaaaatatctagtttcttgtgtggaaagcacacagggagtaacatgaaagcatgtatgcacgcacatgcacgcatgcgcgcgcgcgcgcgcgcgcgcacacacacacacacacacacacacacaattgcgttcttcatgacataatcacttaagttcatatccgtaacagcaagtaatagggttatagcaaaggttcaatgaatgcttattaaaagaattaatagaagaactaatgaattagaagaactaatagaagaacttcttctaatagaagaactaatagaattaatgaggtagaaacataagagtattataaacttgtatacatgtgaatgagtatacagcatatgctacatattttctactaagatctttttaattatgagagctacatattattttgagattgttcaataaagctccccgccttcttttacataaataccattgctgttttaagcagataggggctaataaatggttttaccagatatttcttcctgcaggggtggcagatgtacacagggaatcagttacttaattcccctaatcacccatttctttcctccctcttcattctgtgcttggaaacttcaacattccccagtgtgctaatagctgacccgggaaactggcagaaaccaaaaccttctcttgaaaccagcaggctccatatggttgcttcaaggatggagggtgaccctgccaagtctcctgcaaagggatttcacagagcagagaggcaaacgtgtgtctttaaacgttagtcattgagccagagagaagaaatcattttcctgatgaaaggcagttaaagtactttgcagcttctgatctgcaacctataggaagttttgtacaatggcggctcaatgccaagcattaaaaataaatgtaatcatcagatgattagctctaaaaatcttccctcaaaaaatgatagagttgtcagttacagttgaacatacatatgcatatttgaaaacacggagaccaagaataactttgcgtgtctgaaaccagcactattctacgtgtgtgagggtaacagaggctatgacatagcatatgaagtcaatggtggagttgttattatttatacatgagtaaagattacaaatgcaagccccagctcagatctctcaccccctggatctgtgaaacctgtcactcagtctcccgcggtgtgtcttcctgtctcggagccattggaccacctgctgccaagactctcatctactgcatcgcccgaaggcctcgatgataacagcattgattccaatgtacatctaattacttctcataatctattcatttcacaatagtgtagtgaaacatctgtcacatcataaactctttagtagccttatcaaaccaccaaaacacactctgctgccagttggcagtttcctcggtttcctgtttattaatatgatgcaaacattcctagtcttttttgcagctttagatgaatttccccaatgaccagtgaagcagaactgggcaaactgcagttgaaatgtctgtatgttacttattgagggacaaatccggatgtcacatgaaaatcagttaaaacagcattgtttccttggaggaattgtctctaaataaagttctttcattcataacggtgaaagacagggccccttccttggcttcgatgtgtctgattaatttactaaaataagccactgggacattattgcctttgaataggatattacacaggaaagctttttaccttcctatctttaactttacctttgggaaaattatgctctttcctctttctcctctttctgattttctctcctcaccctttctcttcctccccattctcttttctctctacccttttgtagaaaagctaataaagagaccatcatgtcatagttgattagcaaatactgctattattcagtgataaagtcgacacaatattctaggtacaatacagataaatacagcatcttccaaaaaagagatccatcaccaggtcctgaatgttggtaaacttacttctactcattctttaagatgcagttgaacaatatcttcttggagcagccctcccagggagaattattcaatcctttctttatcagctcataacaacttgacatctctattcatgcacttaacataataattgaggatcattgttatacatatctgccttactcacaatgataaatccctcaaggataaggactatgactttttcatgtttgtatccttggcaacctgctgggtgcctggcacccagacaatgtcaaatagatatagatattttctagttcacttaagaggattgaaaaactgcaatttcaagagctcctttacatttattatgaaagtcaatataattccctatattctgctctaataataataatggtcattccttaaatgtaccaggcactattctaagtacttcatatatatcagctcatttaatgctcaaaacaaccctgcaaggatgattctattatggtccacattttagagctaaggagttgagtggcagggagactgagtgcctgccttcctcaaggttacacagctggtaggtggtggagctcagcaacctggcatgagtccctgctcttaattcttaccctatatggtctcttcagtagctaaattatgctcctgttaactgcagatggccctcatatcatctgatcagttagtctttcttgacccattcttgaaggtctatagggaaagactgctgtccatgtgggtgtcccaagctgtccatgagggtttataggatgtatatgtggcccatgtcattcacacagtattatgcaaataatttcagcacagccttttgatattacaataggaggggccatttcccatatctgtggagggaattcaagctttcttttacatttccagtgcagatttcaggaaatcatttctgataaaattatcaactcttattaacatacttctttaaagaatccttcaggaagccatagatgttagaaggttctatggctatattcctgatgtccatcagaacataaatttatttcttgtaaagtgtcaaatagctaccaaaaaacaccttatggcccttattatcctggattgtacttagtgctaatgacctacagatgaaaaactttgtcgtattacagatcccctcagataacaattccctgagtactcaagagtcaaggctaaagggaaatcagctgtttggctctttctactgtttgttcaaatagtatatagcttatagctacatgtatcaaaataaaatatcatgtacttaacaggccaggtctccatttctgtatatcccagtgaagtacatagctctgtgaactataaattagtcttttccaaaacttgtaaaacctggaaggacaaggtttgggcatggcagcagagctgaatgaaagcttgccatcatggtgtactggaagggtacagatacatggtgaatgccactgttctggactttgtgttcattggtaataaatgaaggagctcaacttgtttttgcaagagggacatttgcaataattaatctagggacagagagatactgtaaagatcaatgattaggatttgggatccggcctcagataaaccagggctcaaaactctcttcttcctcttaataagtgagtgagtgagtgacttttggaagtcacctccctaaataccagttcttcatctattaatgggcatgttaacagtacagtcctgaagggctaatggaaagaaaatacatttaaagggttcagaatactagtacctgtgttagatgaacattatttagtattgttattgtcactgcaggtacaaaccatactattacattattcatccccatatcaaggagaaaaggagaaaaagagtcaaagaattcaaagttaagactataatttattccatttctttatatttaaaactaaaaataaattttgaaatgatttgaacattttactgggatctttaagatatctttaatcaaaaggctctatttttaaaaacgttatagaatttaattcaactgttcacatgttaactaatttccaacaataagttcctgaaagtaaaaaatataaaataatgagttataaatgtttctttgaaggaactgtcagtacaaaaaatttccctttatgaaacactaggtcatcccagcactttgggaggccgaggcaggaggatcacttgaacccaagagtttgagacaagtctgggcaacatggtgaagccccacctctacaaaaactgcagaaattagctgggcctggtgtcatgcgcctgttgtcctagctactagggagactgaagtgggaggactgttgaggccacaaggtggaggctgcagtgagctgtgatcacaccactgcactctagcctgggtgacagagcaagactctgtctcagaaaaaaaaaaaaaaaatctagaaagcagcacaatgtgtccaagtaatcaggtatagacagagtactaaggattattaatgagaacagtgcaggtagtataggctcagaaaaggaaggggctgccataagaatcatcagcagggaaggcccctagtagcaagagagagggagctgacctttgaggaatgggcaaaatgtagataaaaagctgagtagtgggaaatcattctgatccaagagaacaacaacttttgactcctgcagctctctagtcagtgtagttggcttactcaaagcagagagtgccagggcacatgtagctgtccatccttgcctattaattcttgccaattctccttgtacaaattcaaggtggatttgcctggagaagtgggaggaagtaatagaggatctactgaaggcaggatttatatatcttgtgatctagataataaaatttggttgctcaagcctctggccatagaccagagaaaggcctcctcttgaaagctcagcttgaccatgaagcctttatgacagcatagaatgtggggaaaatgcttttcccctctcaagatggcccttgctttatgaatattttaagaagtgatagaataatacagttctcccattcttgcaaaataaacttttatttggaggtacagaataatttagggttgaggctgtcatacacttttgatatctgcaaacatatttgtataaattgactcattccatacagccccatttcagtccttagtacagtgtggtttgccatgcacacactagttacatgaagacacagaaattgactagctgataaaaaatttgcacacatggagacagagagtagaaaaatagataacaaagactgggaaagatgagagaagtgtgttaaaagatgcagacatacagtaagatagaatgcataaattcagtgtttgatagcaaagtaggatgactatacttaacaaaatgtattgtacttacgtgacggacaccctgattaccctaacttgatcaatatatattatatacacataacaaaatttctcatgtgctatgtacatttgcacaaactaaaaagaaaaaggaaccaaacagcttattaatgagtgaaaagaatgaaaagttaagggattgtcttagatatttagattttttaagtagttagctggacttaccatatacctgtctgctgaagaaacattcttttgttagctcagcttgtgggaggttattgaaaggaagttgtaagaccccaatatcatggtccttccacgtggcatcaaaaaggattaaacctttttggctcctggttatgttttaagctcataagaaggctttctctccaccttgtgcctcagctttaaggccataggcgtgtcatttctctcaaaacttctctgaggcttatttctcttttcctatcgccatggctgcctcctcacacctgtagctagtttctgacaaagagcttcacatccccgacctgctttgtgacctgctttgtccaggtgtgggaaccaaacactgagaagtccactcctggtggcagtcttccttaagatagtgctagaaagtagaatacgtccccaggttcccctccagccacaggcctcccccacctcaaaatgagaacagaatcagtggaggatgaggatataaatccacctcagatgaagacatgactcagatggacttggacaaaaaagcaaacaaattgagaaatccaggttattaaaaaatggacttggacaaaaaagcaaacaaattgagaaatgcaggttattaaaaaaacatacaggatgaccaaacaatgatgacaaagagaactgtactattagggatagaaaagaataagagcatgcataaaagaatttaagaaaaaaatggaagtattggtatgatgtggataaagggaaattgaactggacaaatgggaagatgtgaatataaatgaacttggaccatctttaacatttcttctccccagccctcaccatagatgagaagaaagcatcttagacctcccaccctttccctggtgtcctgcctaactcaccatccccttgctacctggactatgccttggccccgatccagcctccataacctttcctcacatcaatccccactagagcctcttcttgggcatggactgactcatctactactgtttcatattttgtgacctggagttgcttggagagttctggggcagagctggcaagagagaaggcaagtgaggacctcctcaaagaaaatgtccccctcaacaatgtgggctaaagccaaatagagagcagtcttccttagagagatatactctacctccatatttttatttttcatttattctaattccccaggccaaggggccaccatctttgtaactatctcacactcctctttgtgtcttcaaaacagtcactgttactgcctttatagtactcataagaagaaaaaagtgcaggggcaggagctggccctataagaaaaaggaggacctgagcccaggcttccatgagtggggtgaaagatatgatgaggagtcaggagagaaatgtgggacttaagaggataccatttaaaacagggtaggaaggcatgaactgaggaaaatgatgaactgaagggagaagtttaggggatacagaggagggaatgcagaaagggaggattctagctaattaagatttactgagacccttgaatcctcaaagtattacagaggatgaaaagttctgtaaaatactgcttctatcacccaggattattgttctattcttgttcagggtagaaataaattgcccacaaacactgtcatctagggtagaataaaaagtaccatgaaggccatattcataaggcggattcagaacacagagggatgaagtccaacatctaggaaagttgccctgggagctgtcatttgctctggacatgaacacatagggcaataatagatacaaataaaatagaaagtggcaggaaaaggctttccaggtggagagcgcagcacgagccaacgtaaaggagagccggggaaaggcacgcttgagagactgccccatagttgcatccatccattcgttcagtaagcatgcactggccacctactctgtgccacagcttgtactgagcacaggagaaataaagtgaatccacctcggtctctgcaccgagtgttttcagcattgctaaaatcagagtttgtggagggagtaagagatataatagattccaaagaacgataaatgccatgaaagaaacctaggctttgttctatgctttgtgtaattgtgtcctattctttgaagtggagaatggcattaccagacatgtgttttgagaaagaaaccagcaaaaatacaaagtgaaagagatcttgaaaaactttggtgataaaattataaaactataacattatacaactataaaatataattttataaaattcaaatacccagtagctagtatagacaaattaatccttattgaatgccagaatatttcagcctaggtctccatcttctcaggcacacaggcagatggagtgtcctttcccacatcacttcatcatactatgtgacccttatgcccattggtaagcacctgtggagacaagaagcaatttctgggttagaataccatcaagttcatggtaagactagacttcaagatgtctaaggcatggccagtgagctagagaaactgagcaaggactataactaccagtgagtctgccaggtctgggccatgagaaggagagagtaagggggtttcagtggacctcagggtgatgaattcatcaactccatattgggccccaaattggccttccaagcactcctggtatacattgtcttctactctatagctctggccagaattgctgatttaaagagttgtagccttaaaataagatctaccctctgagcaaattttgaagtatacaatacggtattgttaactgtagacactagactatacagtagatctctaggatctatttatcttgtataactgaaactttgtaccctttgactaatacctgcccctggcccctggcaaccaccataagatggtagctcttatctaaagtgctcttatcagaaaaaaaaatgataataaacagagtgggaggaaatctttggaagggatgaagaggtttatggcatagatagtggtgacggtttcaccaatgtatacttatctccaaactgaagttgcatacattaaatagtacagctttttgtatgtcagtcacacctcaataaagtggtttgaaagagttaaagtataaatatttgtagacttagattctagctgttccattttaattctgtgcctaggaaagatgaaaacatcttcatttttctttatgatacagagggcgaatgcagaaatggaggagtctaactaattaaaatttacttagattcttaaatgcttgaagtattatggatgatgaaaaattgtataaaatactggttctatctcccaggattctttttctatagtgtagaaataaatgggcacactggaaactgtaatgtaagataaaatgaaaaagtatcataaacttataataatcatatactctcctgtaacatcatcactcagtattcgcctgtcttcacttctcctaagacaatgattccagaatttattgttgttcttcatctgcactatttaaacatcttagcaccagcttttttcatttttcttcaaaaatcctcacttttgcagcctatttatcctctctttgaaatatatatgttatatatatgttacactcaggtagcctacttgattacagccagaaaatcacagctttaatcttggaggggccacaaatcggtggagggagaaggcaagttatgtaaacacattgttttgtagtttctctagcaattagtaaggaagagcaaaactcctcctgcctcacaagggggctgtgaagattatgtataacatattttaaagtatttccaaaagtagaatatgcttagcaaattcagtgcagttcatgaaataataataaagcactaatccattaatggtgcaggaaataaatttcagggacttccttccaggagtgaccaccccaagtttctgtcccccagctggattctgccaaggataataaagaagctcttcatgcttttataccttcaaaaacatttgattataacctactatgtgccaactattgttctagatgctggagatactacagctcttaaagttatttggaagaggttagatcatgttaggttatgaattgtaatcatgattgttattacaaattgagttatttttatatgtttaaaagtaaaaaggcattaactttgagcttgatcaaatgtattctttttatttgaaaactattgcaaagcaaatctccattttgctcataccaattttaggaggaattgtttttaatttatctttaaatgataatacatagcacttgtagagtgttcaacttgcttttctccatgcactatacctgggttgaaaggaaaatgatgaaggaaggaaggagagaagagaaagtgaatatttatggagtgccaaaattgtttcatgtgcttttatacccagaaccttacataggcccctcacatcttctcttgcaacgtgctggatcccacaatgattttctctgccatgaaggtttatagctgatcaatgacagtgtggttctttcttgtacagtaacttaaaaaaaaaaaaacaccttgacatgattttcccattgaatccagaggagaaaggattttgtcatgtaaggctgatagcagatatgcattccccagtgggcttgaggactgtagtttcccagagaggccaggtcacaaataaagcacaagaactgacattttacctctttcactgctgagatgttttcataggctccagtcctgttccctctaacttctttcgcttctgggttcagcagggattccatttcattctaccagagcttcattctgttgttgttaattctagaatagaattgattccaaattttgactactataaaccatacccaagaggatttcccttctgaagtacccaaaggactaaattagaggctatttcatctctagcggtagggatgggatctagtggtgtcactatgggaagtcccttaaaaaattaattttcacttataaaacagtgtgtagatcattgttttgatattcagtgacccagtgacccctaactttagaaaaaatctgggaaatggactttaggcattctttcgtcctttgtcctaggagtgatgcctgccactacattctttccactgaccacagtctacttcaaatcatgaaaagttcttcattctttcatgccttcaaaaattatttaatcagcacttactatatgcaagacactgttctaggaactgggcatgtcataaataaattagtaatgtccctgctttcatggaacatgccttctagtttaggaagacataaaagaaataagaaacaaataagaaagatgattttacatacttatgtgagtaaatacacacacacacacgcaggagaagcaatagaaagtaactaaagaggactaatattagtaaggtctatctgtagaggtaatatttgaaaaagaaccaacagagcaaagaacctgggaaagaaatttccaggcaaaaagaactacatacaaatgccaaggccttgagacaagaataagcttgctcaaggcacaaataaaaaaaatgaataacatagaaattgtatctgagaggtaggtagaaaacagatcaaaaaggctttgtagaccttgataaggtgtgtgaattttattccaaatgtgatagtgaacaactagagtttttaaacaaatacatctagtaatataatttacagttaaaaaagttgctgtggctgctggtggaaaataatctgctgggagacaagagtgggtgcaaataggaaagttagtggtggttcaggcaagatgtggtggcagcttggccttcagtggtgacagtagtggtgaaatgtaacaggctaagttgggatatatttggggggcagggagttcctgcataaagagaaggggctggaccacaggaaattgtgttctttctcactactacttcctcacaactctccagataagaactcacggctcatggctcattttgtgttttcaatagtgtttgtgcttttgtttggaaatgatggcaacacagagccaatagtagtcattgttatgctaaaatagtgtacgtgaagcatttagcacaggcctggctcatagtaagtgtataaccaatgacagctattattattcaaaaactgatcatcactagcttcagtgcatgctcaatacagcttgctgagtttaatattgtaaaggtattggtacttttttccagaacattctattgaaaaatttttttattctatgactttaatatgattaaaaaggtagacaagatagtgtgtccagctgatacagcactagaggactggttacagaccaggaaataattcactgtgttacccttcactgagcactcaccatgtgtcagacactttgctctgtgccagcgatagatgagtgtgacacacagcttgccctcgagagtttctcaatctaagaggaaaaataaaaatgcaattaaatctatacaatacaaaacataattaaatctatacaaatgacatgtaccagaatgcaatccagaaaaaagtgtgatggactatgtcttatggtagggggtaagaggagaaagggtaaagaatggttatacaaagaaagtgaaacttgagaaggattttgaaatataaccaaggggataaggatggacagggcagtttggccagggggacaacatatgtcatcaatttatttgagagccacttaagccgatgttctcattggctaataataatgtcagtactttattgccaaaatagaatttgatgtccatttggcaatacagattggaacaccaatgcaaatagttaagcatttactgaaatattttcaatagaatattcattgtattaaatattaggagacactataggaaataaattctctgatcaaaaacacttggtaaatactagacttaataaaattaaatagccctctgaaatacagtatcagagtccgtaatatgctaatagactgcatgaatcactaaggggaagagagaatatatagtgttttcaaatatattggatcatagagttcttttttctactgatcttccagggataatgttctgaagaacagacttaaaagacaatacagccaagcaagctgcatgtttaattttacttcaaaccactttgagcctcaatatgattatctggaaaatagatctggcagtacctttttttggcttttctcagatggcttgtcatagccatcatttgttccatgaattaatagaaatgtcaaagaaatgccaggaaggtggcacctcctcctagatgggcagctgtgtattcgtttgctagtactgccaaagcaaagcaccacaaactgagtggcttaaacaacagaatttatttttttattccagaggttggaaatcccagatcaaggtgtcaactgggctggtttcttctggggattctctccttagcttgtagatggctatcttctccttgtctcttcacatggcctcccctctatacatggctgtgtcctaatctcctcttcatataaagacatcagtcatattgaaatatgaactactcgatgacttcattttaattcaattacctctataagaatcttatctcggccgggcgcggtggctcacgcctgtaatcccagcactttgggaggccgaggcgggtggatcatgaggtcaggagatcgagaccatcctggataacaaggtgaaaccctgtctctactaaaaaaaatacaaaaaaaattagccgggcgcggtggcggacgcctgtagtcccagctactagggaggctgaggcaggagaatggcgtgaacccggaaagcggagcttgcagtgagccgagattgcgccactgcagtccgcagtctggcctgggcgacagagcgagactctgtctcaaaaaaaaaaaaaaaaaaaaaaaaagaatcttatctccaaatacagtcacattctgaggtactgggggttaggacttcaatatatggatgaggtgggagggtgaacacaatgcagcccataatactctggttctcaggttgacagaacactccaaagtcaagatctccaattactcaaagctgatcaatgataagccaacatgtaagagaagggctgtaaagtaaaaacaaagctatatccattttattaaaccaatattgagctccattttgtatacactctacgctagaagcacagataggtaagtaggacagatacagttcttgacctcacaaagttagtctagtgtgattctagtcaattacccctggaaaatgttcatggaaaaactgaatagtgatgtgaaatcagagccaaggtggtagttggcaaatgctgaaggactgttacatcatctccactagaatcaccatttaggtggaccatggctccaggatcctctctattgaggatagagaggagttaatctatttctttagcaagcctacctttcagacttaaatgtattttctaataaccttgttttgtagactgaatgtttgtttgccctcacaattcatatgttgaagcctaaatccccaatgcaatggtatttggaggtggggcctttggggagtagttaagtcatgagggtggagctcttatgaatgggattaatgccctttaaggggatgaggagaccaaagctctctctcttcctctgccatataaggatacaataagaaggtggcagaatggaaaaggccccttacctagtcatggcttaaccatgctgggactctgaacttggacttccagccttcagagcagtgagaaataaatttttgttctttataagctgcctgttgtttatagccattttatggtattttgttacagcagccgaaactaaggcactttgacagggcttgggtatttcccaaatctctcgtgttaatatacatcttctagggcagaaaacttctatagatacatattcaacacttttttgtgaatttttttgttacttcaaatctttaaaaatggccattttatatatttgtttccaaattataaatctgttttattgtagccccctatgtactatcttatttatttgccaaaaagataatttatctttgagccctaactttagaaaaaatttgggaaatggactttaggcattcttttgtcctttgtcctaggagagatgcctaccactacattctttccactgaccagagtctactgcaaatcatgaaaagttcttcattctttcatgccttcaaaaattatttaatcagcacttactatatgccagacactgttctaggaactggggatgtctttttgcctggaaatttatttcccagtttctttgctctgctggttctttttcaaatattacctctaccgatagaccttcctacggtattaagaactaagtgattctatagagaagacatggaattaacctaggtgcttatctgtggtatattagataaagaaattgtggtacatatacaccatggaatactatgcagccatagaaaagaataaaatcatgttctttgcaacaatatagatgcagctgcaggatattatcctaagcgagctaacccaaaaacagaaaaccaaataccacatgttcttacttataaatgggagctaaacatggacacaaatacgggaacaataggcactggggaccccaaaaattgggagggagggaaggagacaaggactgagaaactacctattgagtagtattctctattgagtactagtaatggctgacgggatcaatcatagtccaaacctcagcatcaggcaatataccaatgtaacaaatctgcacctgtgtccccctgagtctaaaataaaagtcgaaattttttaaaagagaaaacattttatgctgatggaactgtgttatatcctgattatgattacctcatcttatgcagttaccacaattcatcaaactgtacatttaaaatcagtatgttttattttgtatgaataatatcttaatcaaaaaagaaaaagaaaaaaaaggaactaagtgataaaggccaaatttggttagtgctattgaactaaccaatctagaatcaatcagacttttgtttttctttttttcttgttggaatcaactgagcattcagagttcaccttggcagtagaacaaaaaaatgaaaccaaagtgattattttagcaatagcaaatatacttaggtcgtgtcttatcctttacactctcaaagcccacttctgtttggaacgcttcatatactttgtacctccgctgcatgtgtctactgttaacctggtaaattaggatggccaaccaccatggtttgcaggggactgaggagttccatgggatgtgggacttgctaaaaccaagaaagtcctgggaagactaggagttggtcatcctacaaaggcacaaataaacacagagaatgcaaattctgaggatttgggctcccagcccccagcaccctgatttcttctcttctttccagccttcctgacacatgaatgtagttttctctgtaaagcttttcctacctcccctccaccaatcacaaggttaactgtccctttaagactctgcagcacttcttcatgcctcccatgacattgtaattatctatttccttggttctccttcactggacaagatcctcagtggacctgcccacaccttctttgtattggtagcctcagtacagcccagttatcacacttattaataaccatttgcctgaatacatagatgaataagaagagaattttcccaaagtactgtgtttattaaaatcataaaaactgaatattgaaaagaatactttaataatatggtccagctacccatcgtgatttgggggtcaacaaaccaggagtcccaagactttcccttattatttgtacttcctgagcacatagctgagccaccttgaattcatttgttcatatgtgaaacacagaacacaataatttcttctcaagctgttgggtagattaaatgagatgatatttatcagaagagggttgtaaacttgggggcactagacaagtatcaggtatcattattactattactaatgatattagcaatattattattcagtggagaaaataaaaacactattgtaaagcctttgcggattcccctccaagtgactgtccatcttctgctagaatttaatctctctgaatgagaaatactttccattctctcaattgttccccatgtaaaataattttatattttattaccagccctgttgctcttgcctaaatagtagttaatttcgagtagtctcaggctgagaattgagcacaatagtccagatgtggtctgagcagtattatcttctcctagattctatactccatacatctgctaattgaacccagacactctttagctcttagcagcagttgcatcacactactttgagtcttaatcaaagaaaatagcctcattctttctatcttctttcttttccttatttttctttcggttactttgatgtgcttgcatacccaaggaaggtccccttgagctactttttcccatcttgagcaattattgaactaataagtgggaaaatgtgcaaaacagtctctcaaaaaccaaaaacaaaacccagcagttatttgccttctcccatgccaacaatagagactgaataaacacatgttctttcatttttcacttatgataggcaacactaagattcacttcctcataggccggttttgaatgttcaagtttatcgggctttaggttcagaacactcactaatgctttgatgcactaagacacagttctcactggaagggtttttattaagtggacagctatggtgtcacaggcaagacatttgcacagtgcattaatttagagagaaaaaggtttctgtgtaacttaaccagactgaacagctatttccactttacctgaataaagtattttcatgttttatcacaatagtttgcaactgcaaaagcttcgcccagtttttaagagtagctatgaactgtcaggatacattatttgaaatgaagcctgacagctccaggcttgaaagtaaaatacattttattgtttaaaagcatttctctgccacctcactttcatcccccctcccaaactccgctcatcccaccatcccttataagcacccctctcctggcctgaaatgagattcactgcaatcattctaaaattgtttaatcctcattaaataacactgcatgaaggaaaatcttaaaggtggggtttccttttcttagtctgaaaatgaatcatgagaactaatacagagtattttgtgtatgtgagaggaacagatagcacacaagaagttgtacacactgttgtgttggaagaaacaaaatcctgttcagttagtatccggagaaggatgattaaatgccaaatggcttgcactctgcgctacatatattaccaccttggtgactggaagtttcttaaacctctagtctgatggtccatccgaagagagacaacacagtgaatctttctcttgacaacactttctcaagggacccttgagtctttaaagcaatctttgtctgtttccagattctgttttttctggccttggacagaatgttgtttgccagagaagactttttctagaatctctgaaattaccatggatttatacacacccatcagttatgccttatatattctgaagactgatattctagggaacatagtagaggtggagtgatgttgtccagtgagcattcttctccagaaattcactgctacctttttcttaccacagcatcataatgattgaagacaggcaggattccattcaaagcatacagtacagaaaagaaagggctgggaaaaaaattaacttacaaatgaaaatcttttgttgttaatgatattcaataatagaagcctaatctcctacgtatattatcatctggcaaactagttacacatttaataaggttttgctgtataaattataaatgaaataaacaattctgtcaccatggtgtgcaatgaatacaccacatgttatatgtaaatatattagtcatttgccttttgtttatgtgtcactgaaatccattttctttatggtgtattttctattccctatgggttccaaccaaagtcgtttcaaccatacacatatcggtctttaaagtggaattatgctgttattgtcctttttctgcccagttttaataacacctgcttttgtgccagtttcatttactgctgcaaattgtaattcaacagagaacaacaacaaaaacaacaaaaaaacccaaccaccctaacagcaaatgtgactccagaaaggagctgtgtgatatattgacacaatacagaaaacatattgaaacaatttttattctcattatttttcccccaaaattaaatatgcccaataaagcaagttaacatattctgcgtgtctctctccactcccaactaaacccaaatccttggcttttaatgagataattttttaaaaaacagaatcaatgtttcagcctttcaagtggtggcatttttattttaagcagagaggcataaatgcatgaaggatgcaaatctgggctctttcaatggctcaccacagtgtgacagctgtggacgggatcaagacaaaagcggtgactgctccaagaaaatgatggcttaggcatctccagcccaatcaataatctggcatgttgaggtcaatcactgcatgaccatattcagttcgagccagccaaagattattagtttgacacccagaggctatttctttctgctgtggatggcggaaagagagcttgtgtgcatctcttcagaaccaaatggagaaagcctaactatttataacaatagaagcactgaaacagaattttcagagaggcttcatatttgttaggaggaatcccctacaatatcctccaggctgagtaattcttctgaaattgtcactaagctaattttgtgtttcatccattcaaaaaattagaatgtttttaagcctctatcatttcccaggctgtgtcctagcacctggcagatacaaacacaaataagatacacttgttatcctcagagaggaataaatgtagaagcttctacaaagatgttgatgctctaaatttcctctaatattcggcattcctatttttcttcttccccctcttctccaccctggccaaatttcccacatgcaagcaggacagattttactgggataaagataagaggggaagcaagataatcattatttcagattatttgggctaatagtattcagatctagcctaagagatagctaaagtgggttccagaaaacatctgaaagctttatacattactaaaagggcaatagaactagccacaggaagctatttctaagtgacattccagtccttttctgcagtccactgcctgtctaaggcattcggttgctgaccatggtgttcacatatgctcactaacgggaaacagtttgtggctaggagagatccacaggagtgtatggaatagggctcttgctgtctgatatttcaccagtcatgttttactgtttctcctggatggcatgccatagagtgtaataaatctcagtttgtttatattctgtgtctgtatttgcactttggtgattatatttgaattcatgcaagatcctttttttttaagaacttgagcataatcttctcattaatcctgtcctgtttgtctgttattaacaggccactgtacaatgtattctgctgcaaaactccaccaggcatgactaattcagataattaatttgctagaacattaacaccatcaaatgagcctgctaaaccggtaaatttaaagtaaattaaacttaatttgcaggttattgcaattaagtctgccttgtctttctgagggatttcaacatcctcagtatttaagaggcaatcataatgcatgcaagtgggcgggctttttggctaattaacacaagagtctaatctgcttttcaattagggtggatgtttataatgtgctggtgacagtgttgcgattcagtgcagcataacaggagtgcgtggcataattatagctgaaaagaaaagctcatgccgggcctttttaggggttaatgagacattggcagcttccagctgaggagatcgagccagtttagtgtagcttcaagaggaaaccacccataggggtttcctttgaagtgtcaaaaggtccccttgttctgggtggcttatgtttcatttgtctgagtggcatatcaaaaattgatgagctgccagcagcagtccctatgacattaattcaccaattgtgtttctaatagtttcatccttaaataaatttggatgatgagaatggtaaggagagtcaaggttctgaaaacaatgagcagagccaggctgttgcatggtttttatacaacacagacaaatgtagcagcagtaaatgttaaaggcatggctggcctactacaccctgggttattagctaagggaagacaaagatgtattgtgcctgtgccctctgccaaacaacagtcactcaaaacagtgataaaaatgtggcattcactggcacttagcttaaactcttaactatacaggggagggatcttaagctggggcttcagaagaggaagtttctatgaatctgagacataaacctccttggaaacactcttactaaagccgcctatacatcagagctgaggctaaggggaaatagccaaatagtaacacaataagattgcacttacatttagagtatggaaattcacattatctcctcatgtctacagtaaacactaaaccaaggtgctttgaggctcagcttgaaactgagttgttgaggtatacttgcatagaaaccatcttccagtgcttattatggtctagttcacctgaggctatgtgatgtcattgtgctgtctgttttttgttgttgttgtttgtttttgttttgttttttgacagagttttgctctgtcacccaggctggagggcaatggcgccatcttggctcgctgcaatctctgcctctcgggttcaagcaattctcctgcctcagcctcttgagtagctgggattacaggcatgcgccaccaccctcagctaatttttgtatttttagtagagacagggtttcaccatgttggtcaggctggtctcaaactcctgaccctgtgatccaccctcctcggcctcccaaagtgctgggattacaggtgtgagccactgggcccagccaatttctggttttatatgttctttggttatataatgaggaaaagagaatttacaaatagacagttgtttccaggatgaatatcatacatgtcatgcctaaaatttatctgagaacatacatctggtacatacattggaatgactagcatcatattttcaaaatatttaggtgagcaagtggaaagtaaagacatcaaaaccttgtgcaaaataaaagttcttaccaccacagtgctacatgttttcttttaagaatgccaaattatgcatgatgattataaagagcgttgcaaagatggcccttcttttggccttcatgtaacatgcatgaagtaaattacagctgggtaaaacccccagcctttcacagagacatgaatggagcagtcaaataaattattccaggtacttgcagaaagattaatctacccaaattaattgtaaaatctcctaagctagtattgtcacatagacatagccaaagaaagtcatgatgtattgcaatggatgttggggaataaatccattcattcatttgtttctttatctttgaacacatattatgtgacatacattgtgcattgaggctaaggcaatgaccaaaacaatgtccctatattcatggagcttacaaataaatgggagaccatcagttattgataaatgcaatgatgataataaagtagggtaatgtgacagagtgactgaaaggctactttaatctgggtgttagggaatgaccatctttgcaaggaggtcacattgaagatgagaccaaaatgatactgaaaagttttcaataacagatgacctaatttgtagtttcaaaaagatcactttggctcctgcctggaaaacagaagtggaaaggcgtagtactataagaattaaagcaatgagaccatttagaagtctacttgtgtgttctagaagctaccacccaggctaagcccctgggttcaaaatatgatttagagataagtttgatgttttgttatacaggacattgaaattgtgagtaaattattaggcattcacatggcaatgtcaagttggaagttggacatatgagtctggacattaaaggagactccagagctaaatatataaaataggaaagcagccgttgatattcagacatgagctggcagattacccatggtaggcagtgtacttagagcaaaaacagagttccaggattcttacacagagccacagagagggagaagctagcaaaggaaacagaagctgagtggccagtgaggtaaggggaacaaaacatgaatatgaaggagggcgacactggaaacaaaagaaaatgttttgagaaaaaagggagcagccagcagcgttgaatgctaatgagaggttgaataaaatgaaaagagacaaatgtccattggatttagcatcatggaggtcagtcgtgaccttgacaagagccatttcaatgatgtgtggggccagaagaaagcctgggtgggacgagaatgggagatgagcaagtgaagaaagtgtttaccgacaattactaggaatatgagatccacgaagagatttttaaatatagaagagagctgtgtgcatgttgatagcaacaatccaggaaagagaaaaacttaaatcacaggagagaagtaaaaaggacatggactccacagcacacggggaagacttggcctttggtgggagccaggctgaagtcctggaaaactgaaggagaatttgaatgtggggattcaggcagggggctgggggatagggacctgtgtgaaatagtcatttgaaggccaaaagccaccaataatagattaggttcaatttgttgtttgattgcaaatgtgtttattgtgaggtaatgcacactcattaaagaaaaaggaagaggaaaatacagaaaagtgtaagaaaacaattacatttaacctccaaaataatagagtggtctaacaatgaggggaacaagtgagtttatttctctatagaaatcccagaatgagactgaaaagaagtctctgtccagtagagacctatatctaggatgcattcagaaaaagttcctttgtgttgggtctttggtccaagttactgtagacgtgtgctttgcgctaatctccatcatcagcagcatttttttaagtgggttctgccttagtggtctattataaaatttgtcatactcactcttactttccttaaattccaaatcctcttacaattgtactaaatattgtgtaaattatatagtggctttaatcagttttcaagaaagaaattgttacatatataatgggatgttttagggaatttatttttttctgctaaatttctggcatggttacaatagggggaacatagccaggaataagaagtggcaaggctggagcctagggcacaatattaagaagacattcactctcagactatgcaactgagaatgagtgctccctaaaacgttgtgccccagggcatcaatattgctttaccctagtactgacccttgctaacagcctttctcttccataagttatctcttggagctactcttaagatatgatggattgggtatagcaggagtgagtcctggcatgttcctttttggtatcattttaaagatttagtaaccatggatatgtagatttatgggaaaagtaaacaacacaaaacatgcacaaccagaatcagctcttctgtaccttcctaaattaaagatgtgttttgtttttatataaaagtaagtgacagagagtaaatagcaatcattattatactgaaattgaaggatgcaaggcaagtagcacaggcctggctcatagcagatgctcaacaagcgagagctattattttcaaaagtggttatcactagctgatgtgtgctcagtaatgtgtttttctgattttaatattttttaaaaaacacatcttgattttttaaatatataactgcttttaagtagatatttacatgcagctactcttacttttgtcctttgcgctggtcttatactaataattgcatctataaagcatcttaaaatttacaaactactttcactcataatagcttgttggctctttgcaaccacataagttacccagtattacccagttgatagagtagtaataagctgagatttgcctaggacacagctttggaaaacagacccaaggatgtcacttaggacttctgacttcagatcccagatctttctactctgtgccattaacaattagataataagtcttttcagctcctaagcttggatgagaaagaagccagcaagatttcgggttgctgtttttataaatcaaacagggccctcacccacaacaatggggaggagagagaacgaaattaatcaaagggtaaaatcaagaacctgaattgctttctagctcaaccaactgcctatagagttctcctcagatatctatgagtcagggtggcctagaattgagattatactgtagaaactaagagccccaaagtcacagtggcttaaaacaactgtatttaattctcactcatgtgacaggacctatgaacaatggaatcattcagggttcagttctatctcaacacaggtatccacaaccacagaagcaggaaaaagagggcctggtgagccacagccctgatgcgtgtccaagttttcatctaccctatcaattcccccaacacacctccaggcaccaaagtgccaatttgtggctctgttttaattctctctccctcattctctctaacaccttactacccaaatcctgtagactttttctttctcctatctctgactttctcatttgaggaaaaatgccttaaggtcaatgaatattgtatatgagggtttctaccacaaatgtcatttgagaaaacacctcttgatttcatgcaagacatgttttgcttcagaaagacaccagaaggggcacaaacctgtagtcagaagccctaggtttctgttccatattttgcagttcacttaatttctataagcataaatttctatatctgtaaaacggggataatagaatccttatcccactggattgtaatgaggattaactgttgtcataggtgttgaagttcctcgtaagttataaaatcttgtacacttggtaggaattatcattattaatattaatgtgagctaggcagtaataaccttgaagcaattagcagctgttaatatactaaactggatttacttgtcctaatgaactatagaatggttttacttaaagggcaaaggcaatcattaatttactcaagtatctattatgcacaaattatatggtggttactatgctagggtacaatagattctgcaagccaaaaaagatggtttctattctcacggacactaacaataataatctaagacaaaacagtgttttatggcaaagccagaaagaatcaaaatactgtcatatatttaaataggaaaaaagattacttgaacaggaggcatggagacttccttgaggtagtggaatttgagctggacaattaagaaagggtaaagtttcaacaagcgaaaggatataattatatagtagaaacatgactatcatctgaaaacagagaactgctccatcccttaatggctttgttaccctgtgcagcgactgaacctctctgaacttgtagggctgtggtgtggaattagaaagaaagtgtgaaagcagatctgtaatatgcaatgcagatctgtaatgtgcaagacaacatagagagcttgtcacaatgcagattctgatgctgcaaggtctgggatggggacagagatcctaccgctctaacacgcttccaggtgatgatgatgtagttgatctgtggatcacatttaagaagtaattctcaagtttcactttccaaacatacacagcacctttcctgctgaaggtcctaaattatttttttattctgatagttacttagagaaaactcactgaatgcgaacaattctttgtatggtacctaaaacatgctcaatatatgttcctatttgtacaattatttccaaatctttgaatgatataaggcaaaatccaaaaatgtaaaagtgtaggaactgtttaccagattttgcctcgaattcctacagatttattgtgcctgaatatatttcctaaatataaacaaatcataattcttaataactgacaaagataaaggaaagccagtctttaatgtagggtgtagctatttttcataaagcaattaacattatctgtatttaaacaaatggttggctctttaatagccataatactcatttgaagctctggttcatcatcaaagtttttaaacaatttaagaacaaaagtgtctcatgtaacatttcttattataacaattatcatgcaacacttaaatgtacttcaaacattaagactgtcttttctctgtgctatttctgaacttggtacacatgcccattgttgcagttgttatatgatattacattgatatactttcccactatactctcagcaccttaggtagctggcacatagaaaaagccacctaactgctaagagatttttacttccgtagctaggtggcatcccacatagacctgaacaatttgactggccttatttgcatacctcaagctgagtttaatcacttgtttaaaagcactaaggcactcacttagatttatgtttttaaaaaaggatgcaatctagaaaatgtaagatgtgtaaaagataaaattctatgtccatggattgtgaagccgaataacttcaggaatcctggatacaatagtgtttaggcagatcagtcagcgtgatgattgtatatatgtagcagcaccatccagcacaatccagaaataacagcatggccatcacagtgtctgcacacagactttgcttctcagtttagtccaatgtgacaactgaaaaagatctcagagccatcctgatctttcctgtgcagacacaagccaagatcacacacaattcactagaacaactagttacccttctcaagtttcattttccaaacacacacagcacatttcctgctgaagttcctaaattattattttttaattctgaccattacttagagaaaacttactaaatgagaaaaatgatgatgatgttgatgctgatgataatataaataatgacatgctctgtacctgaaagatagaaaggtataaaatgtatgttttcccctctagatgttataaaatagatgaccaagaaagttaatacatagatatacatagatgggagggatgaatgattatggcatttatgatgacaataataaacaatcagttcaggggttgacagtatttatatacagtgattatatcttactttgtttttacaaaataagcctctttaaactgaaggagaaatgagagcaattaagaaacagaaatctgcaatctttggtgcatgctttagtcgttttcttaatttttttcctgaagtgcaaagcacaaggattcttctagaatacaaattaccataaatcctggcctacaagtgcatgactaatctaattgcaggcagaggaggatcatttgctaatgctctcactagagctctgtactaaacgatttgctcagagagcaattgatgcccctagaaaactttgaaaaatgttctagttagaaacaactttgtccatgtcatatattttctgtttttatctccatcatttttattctttaggacatttggatgaaaatttcatctcttttgcttgagggttcatgtgctcctgcttattcctcacctgaaatcatgagctcattgtgacagtctaagatgccaaattgggtgtcacgaaaatcactgtgcagaaccccaactcccagccagtatttatagaaaaaagaagaagaaagaaagtccagtcatttgtctacagaacatgaaactcattacttataaattattgttaattatatattgagataaatatagaaccattctttctacatgccttggaagtaggcaagttcttaaaaatttattgatgttcttaagattcagatgataaaaaacaataaattcctctgcatgtgtgcagcctttgaggtcctagaaaaaactgcaattactgtagaattgcaaatcctgaacttctggccacgagcatagcagcagctccaaccaagtctcccttatctactccagtggtgggaaaacattactgtaactaatatagaaaagctgctgacctgatacagtgagctccctcactgctgctttccactttgccacacccaccactctcaggcacctcagctgctcagaaaccccaaaagtcagccctcaatactgttagtctcagaacatccatacccaacatcaatccagcagagccaaaaataacaagtggaattgaggtggtacataaatttgcatacagggctaaaggagaggaaagacaataaaatttgagctgatttcatgaatacatttggaatacattaacatgaatgccagaaggctatcattgaccaatatataagcatcataaaatactttaaaaagactacacaataataatttaatacattttccccttcactatagttttatttcataagggatagattttcttggaatctcagtttgccagaagatttagagctatttcaattgtcaggtaacatgactttctagagattttttaaaaaatagagaatagtgaaatttaagtcacctgggtgaacataattgaggctatcaggagttttgatggccaaagagaatctttgttaaattcagttttattcttttactcatgtgtaaatattttaaaatttgttttaattgatttttttacttataattgatgtttttaaaaagactttcattggtcaagcatcctgcaaatatatagcaaaggctctctacttgcagagaaatgcatacacatgaagacacaaagcatgggacattgtactgcccacaaaggtggcagcctacttgaataaataatagcatgcactttaaacagttaagaaacaataccaatgtgaaatactataaaaattgtgcttagggccaggtgcggtggctcacgcctgtaatcccagcactttgggaggccgaggcaggtggaccacgaggtcaggagatcgacaccatcctggctaacacggtgaaaccctgtctctactaaaaatacaaaaaattagccaggtgtggtggcggatgcctgtagtcccagctacttgggaggctgaggcaggagaatggtgagaaccaggaggtggagcttgcagtgagccgagatcgcgccactgcactccagcctaggcggcagtgagactctgtctcaaaaaaaaaaaaaagaaagaaagaaagaaaaaaaaataaagaatatggcatagtgcctggcacagagccggaattcagtaaatattagtttccttttccctttactatgggagattaggggatatcacagatgacggccctaaagtccacaaacttacaatctaattagaaagatgagacaatgcctctagagatgaaaaatacatatgaccgtatgaaaaatacatgtggtgtattgaattatcatgtgtatcccaaaatatgtacatctattgtgtatcaatagaaaaataaaatttaaaaagatgaaaaatgcatgaggcaatagtgaaaagtgtcaactaagcatgcaataggttctacagggctaagaaggagagaggattttaaacagatatgatgaggggagattttccaggatgtgatggaatttgggtggtatatacatgtaggtaaatagtgttttccctctctcttatatggttatactcaccacacttctgacaccagatgtgtggaggttgtgcccccaataccaagcaattctccagcagcacagtctctggtgaaccagctggggatactctaatcaattcaattctgacactatctacctggctagatagttgagcccacaggttgaagatccagtcccagaagactatccccccacatcagatgccagtggcaagcacaggtagtgagtgacctgagcttttgacttgatacataaatcagggctcccatgacctccttgttgtgttcaattagtttgctagagcagttcacagaactcagggtaacatttaagttcaacaatttattgtaaagcatattacaaaagatacagatgaacagccagatggaagaggtctatagtatgaggtagggggaagggttgtagaatgtccataccctcttgggtgttgccaccctctagggaccttcatgagttcagctatctggaagctctctaaacctcacccttttgggttttatggaggcttcattagatgggcatgattgattatatcattggccattggtgatcagctcaaccttcagccactctggcctccctggaggttgaagggtgagactgaaagtttcaaccctctgatcacatggttggtttctctaacatgccacagcaatacactttacttttctgaatactcttaaaatgcataatgatttgctcaaagatttactccctacctgtttccaaagatgtcagaagaacttcagaaatgcctagggaaagaaaagttttctcaaaataattttgaatagaaatttccaagttccctattatgctatgtatatttataagaagtaaagttttagtagtctgtggggcttaatatctagatgatgagttgataggtgcagcaatccaccatggcacacatttacctctgtcacatacctgcatgtcctgcacatgtatcccagaacttaaaatgaaataaaatttaaaaagctttagtagtcaagaaagaccttagaatattttcaaatggtttgtcaaccactgggggcaaaatcaattgtaccttactcagtagctcctgtaggagaggatacctttcacttagctattatttgtttataactgcatacaaacttaatacattaatttaaaatggaaatatttaataataatggaattgacttcatagagtcattcaacggatcaaacaaaatgaagcatgtaaagagtttagcagagtgtcaagcacataacattcattaaatgttagtaatcattattattatcaaaataggttagtctttattatcatagctattgcaaggtgggatttacacattcctgctaagatagtcccataatggaaaataaggccacattttgctttgatagtgaattacatgatagttaaaaatttatccaacaaaccttctttgagtgccttctttgttgccaaagtaggcacagagtatccaaggataaataagacctgtttcttgccctccagaatctcccagtcaattgggagacacatacagagatataattgaaattcaaaagaataaacattgtaggagaatgcagaggagagagcaattaaatcggtttgggaggtttgaagaaagagaaaatgtgattatttaattgagccttattacaagaatgaaattgtgtcacaaaatggagaggcattttcaggctgggtaaatattatgtaagaattggtaaaagttgtgtcagaaaagaaagggcattttaggctgggtaaatatcatatgcagagaagttaaagtgtaaaaaatgtgttctattaggggacaagtatacctctgatttttgtttttgtcattttggttttgagagcctgagttatatcattgaaaatacacgtgacagatgttagggaatgcatggattatgaggcagttcaaatgaatggtacgtttaaaaaattggtgtttttgaaattgtggtaagaacacttaacatgagatatactttcttaacacatttttatgtgtacaatgtgctattgttaactacaggcacaatgttttccagcagatatctagaacttattcatcctatataaccaaaaatttatacccattgattggcaaatccaaattttcaactttccccggcctctgataccaccattctattcactatttctatgagtttgactattttagctacctcatataggtggaaccatgcagtacttattcgtccttctgtgactggctaatttcacttagtgtaatgtcctccaggtttattcatgttgtcacatatggcaggatttccttcttttaaggctaaataatattccattgtgtgtgtgaatatgagtgtatatatatatgtatatgtctatattatatatgtacattatacatatatatatacacacacacacacatgctatattttctttatccattcatctatcaatggactttaggttgttttcctatcttggctattatgagtaacacttcagtgaataaggggttgcagacatctgtttaaaatcctgttttctattctttcaaatatatatcaagagtgggatcttggtgtaattctagaaattttagttcatcttgaagtgaaggaaaaaacataagtttttaaaatgaaagagttattagatcagatctgtgttttcaaaagaaacatggtgggcagtatagaggataggttggaggtaggcaagatagaaagcagaaagaccattctgggtgtggttttagtagatcaatcaggaaaggatcataacctaaactaaatcagtaagagtagtaacaaagagcaagggatgttgactagtgaggagtaagagacaagggaaaatacttcaggggaactcacagcattctaactgagcaatagtgaaatggtgctaacatagatcagagatgctagaagaaaatatgatttaagagaaaatatgttattagacaggtgtggccaactgctgtaacacacaatgtgaaaagttcaatggcttaacaaagtaggataatgtcttacttgtttaagcccaattagtaaggatggaatgtttcggctccccacagtgattgagagatccaggcatcttccacctacagtccagccatatcttagagccacacacttctgttggattcttaacatccagcagacaatatggaagtagagaatggaaggtaaatgtaagttttgtgggccaggcatagaaatgatgtacataacttttatcaacactttgttacccaaaccaccacctggctacacctaattgcaaggaaggctgagaaatgtggtctggagacacaaccaggaaaaagaagaaaaaaataataatttggtaaaaaaaaattcagtttctgacataggacatttaagggatgatatccagaaagcaagtgaacctctggaattcgagagaagtcctgattggagataaagattcagaaatcataactgtgcagatggaatagatagcatagtcaggggacagtttgtaccatatgaaaataaggcactattacaaaggtgtccatttcacagggactggatatgaaaattacctaagtttatgatatagcaattattcatccttgttttctgggtcatggtcttttggagaccagagaagtgtgaccagatgaggacataaatgagtgtttgtgtccctgatacacctatcagtcgattgatcaattaatcattcaacaaatccatctctacacttacatattgaatgcctggtaagggaacgatgctctactggtgagttggtatctggctaacaagcctttgtggaacttacgttcttgcaggggagacagcataaaaacaaattactcaatcatttatataattttaattgtaataaaaggaacaaatcagaattacagggtgagatgaaagtatagaggaacagctggtcttcagggacaaaggaggcttatgaaagcgttttataagagccaaaaaataattacgttacgaacactttcccttacagaaacagctgataaggggaaagtgtaagaccctcatgcaaacaattatatcagaaaatgaaatgctaaaagtccctctaagaaaaatacacataaagtgctttttaagtatctggaatggagaagaaagatgtctaaataaaaagctttggtctttacactgtgcctccaagggtgaccacgagttggaagtgtggtgaggctaatcttccagggacagaaaggctaaggctgaggacagctgtgggaggtgggacagaatggaaaatgcttagggaataagtccactcaaacctatggagtgtggaagaggaaggcagccaattggaaagataatttgggaacagataatagagggtagaatttgagtaaagagactagctaaagaaaaccaacctgaaggctattttaatcacccacaaaagaggtgatgtatgagttggttattggcagtggccatgaaggaatggagggggacagatttgagtcagaggaatcagaagcaatagaacttgtcactttttcaataaatattaatttagcacctaatatgaatcaaatactgctagatgctggggcctaagctctcttctttctctcattaatgcttcaggaaagaaaaggatgtccaatacagatttcatacagtacatttttccctgcatagccttttggagattcgttactgttgctcttcaaatctttttaatccatgtatcttacagttactttccttttaccaatctgtctgaaaatagcatgttgttttactgagaggtgaaataattccaaggactaaatatgctgcggttcacaggtacatagctaggtacagccatgtcacactatatacatgttatcttggcctaacagactttatatctgcacaaactgtgaactggcagttggtatttatatacagcctgtcccccagggatgacccatgggcatgcaagtcttccagagctggcagccctctttgaatgctgatagtgtaatgtgtttttatagaaacatatcctaatgtgtgtttcaaacttggagctatctgtctatgtactccttcatttaaaataaaacacaaagatgtttagctgtgcaaacaggaaaggtgcttccaaataggtttcaatttgggccattctccataaatctcctctggtttctttgctttctgttttcaaaaggaaaaaaaaagctattggagtgctagcatattacagtttttgttggttattcacagtgtgaaatgagcatcactaaataaagcaactgccaaataaatgcattctggttacaaagagaacccactgtaaaactaaaatcttaaatctaattaaggaatttccaaaagccatatctttgaaaccttccaacaacaacaaaaaaaaatacatttcagctgggacttgtgaattgcgagctttgtacataaaagaaacaacttgttctaaagctgaacttcagtaaattacagaggcggtgtgtctttcataaccccattacgagggaacgttcctctgctaaaccctttgggtagcaagctctgcaagcagtgctcctggccagtgggttctcctgtaagggattagataaatatcatgcacaggctgaagtcactgttttgctttcaatcatcaaaactggaaattaaaatggttactcaaagtggcttgtacatgaataactggaaaatgtaggtccaaaaggtgtattttagccatagattatcttccatgtgagtgtacctagctgcttgcagtgtgtacatattttctaaatttaagggggaaatcaagctgaaactagaatgacaaagaaagcttctctgtgctgttctggaaaaaaagaatcttagtatgtttctgcatgaacaaagaactttttttctcattctttcttgtatctattttaaaaggtatgaagacaaaggaaaatttcagaacattttctaatagtacaaaatggtcatcgcttggaaaaaaataaagaaaataaatctatttcttgtcacactccctaggctatgtatctctatacatgtggacaactgttaatcaccaaatatccaaatgggaaaaaacatgcatccaactagataatctttatttgatctgcaaaatgatactaatatttgacattcataaagcaaaatatacaagtgtcattttctcttttcaattgtgtattttactatgtaactgtaactaaagaaagtataataatctaggacacattgccataaatttcacttttgcaataatactttacattgtgtgagggcaggtagctggaaatgggtttgggtccctgtaatatagataataactcagttctgcattttacttgcatagatgtgcataaaataaagccttagtgctatacaaggtcatgaggtattggctccaaagacttaaaatatttttcaataatctttttttcatatatacaactttatttaaagaaatattactggaaattattttactttttattttatcatattttgcatttttaaatgctatacatattattcttgacaactgaagagtcagaaagtctttgttaattgcatctaatgtatgtttgccatggacatatgcttgtgtgcatatatttatacatgtgttcatatgtatatgtacagctatatatacatatgtatataatttatatgcacatgtatacacctgcatacacacattatttactaataaacacagactcatatgagtgctttgttgagttcatgtgatcagcagccaatatgcttagcttggccttttttctctttttaaacaaagagccacatttgcctctggccacactatgcactctgtggaacatacgcccaacttcaaaaggaccatgtaagcgatgagcttttaaacctaggcagaaggcatatgcctacatgccttaaggcacagggaggtcaaccaatgcccttatggtcacacagaaggtgtatcgctgtgatcaaactatcagtgaagcgtttcaaactacctagtctctgttacttctgttcatatggatgaatgtaaatcgctataaaaagctcatgggttaagcaggtggctcctggagctaatgttcaatgatagttaatactcgttacccttaattgagtactagacgccagcccctctcacattatatacctatttaatccttacagtcccattaaacaatatgtgttagtgttatttccatttattgatgatttttatctctatttaatccttgtcatacctctatgagatatgtactcacattattcccatgttataaatttaaaaaccaatgcttacagaagtaacttacacacagtgaacagcaaaacaaggattggaggcaaggttttggtgtctccaaaacttatttctgcctttaaaaattttaagtggttactatttattgaacacttaagatgtcccaagcattgtgctaaacacttgcacgtactacctcaatgatactaatcacactatgaggtcgagattttcaatgttctcattttacaaatgacaaaattgacccatggagccctcttaaaccctacagactctgcctctctcacagaatttgtatatacctgcttcatcagagctgcagacaaaagcagaaggcacattacagagcacagttagaactcaatctataaatttctgttgaattactagtactccaagtcactttactttctatgagggccactgataatctacatttaaataatcttaagcaagaggcaaatccctcaaccaaaattgatggtgaaatctaagctgcagatcatctttcacaatcaacacatgggtgcattttacaatataaatctgtgtagatcacaacattgctcacgtcaagctaatatttcatgctttatatgaaaattgtgcatagctgcatctgtggaggcaactgaaaccatggagatgggtatgctttccctcccaaccttgcccattaagatccttctgctttaaggtatacaaatacctagccaggcactgtactaggtacatgtataccttaagtgcttttcatggcacttaaaagccatgaaaaacctttgtgtctttcattgtcttcaaaccagagcttcctccctgagtataactaagtgcccacttaggaaaatatgttgagttctgtgctgctgctgctgatgaaggaagcagcttccatgtttgtctgattacgctgttatccctccaaaccccatttactagaggccccaagccagggttgctcagcccatcctccatacagcttctgagttctcagcaatgcctgtacaatggcattgcagtcttctactggtttttcaccaggaagtggagctgcatagtcaagtttttggctgagttcacactctggccgcggccaaggcctggggctttcccagagctgagtcttatagtcaagcactacaagcacgtctccccagggctctgtagttacagttggagtccagcactgcatgctgccctacttccatcaagagaggcatctacactagcaaagtgtggcttggttttacccatccatccatgaaataggaatatgccaattggccacatgacatatgaaagctgaactccagaaaaaaatcccatgttcagtgactttaccttcccaggagaaagatgccggctgtgattcctaaattcaccattgtcttgttgactagcttcccagacttaagcagttactaaggacctgattataaaagttcatgactcttcttttcttgctttcacacacccaatgctcccattccacaaaataaaactaattatgcttgactttactttggatacaataataatatgttgactactcctgaggccatttgtccactgtaaggtaatagattccttaatcaagaaagtgagaaagaactgatgttgcgagtgtacacagatggcacatgtgtatcacttttcctatataaccacatatatccagcttcagtgtccagtgagatactagagcagactcctgcatccccccgcccagtctcacccatctgagattgccagattatacaaaaagctggaattacctcccattatgtctacttccaaaacctagaagatgaagtctccagcagcccattttttaaaataagtatttatattttgaaaccaaacaagactaaccttaaagccccattctgtgacataaaatgtatcatcattttaagatctatagtacctgtgaaaactagtttatatgcctttttcggtgacccaaaagagagcaaaaacagttcaaaaaaacatgttataagcatcagttgctcattctgcaaaaaaaaaaaaaaaaaaaaaaaaaatcccaaacaaacaagcaaaacaaaaagctaccatagaataagcctcaaaagtgtggcatcttatgtgcccttaagtgaaggttggtttgactaccactcttcaggatgattaactccattcattcaatgaatatttattaggtacctattctgctcctgacttgctagactcatggtggagggaaaaaaagaaggcacataagtgattcctgcatttagggaccaaagtctaagaaggatattggcatgaaacaaataatagctcctattatttttttagctcttacagcataacagatattgaacctagcatagattatcaaatttaattctcacaaacacctgcaaaacagatagtcctagcctcatgcagggataagaaaactgaggctcagaaagtttatgtgactcttgtccaaggtcactcagctagaaagtagcagcacctaggtttatcctccagtctgtccagctccaggctcacatttgtcctcctataccagaagggcagtgacggaggtgaatgcatatttctatggaaatacagcttgacgattagcatgatttcttcttctaagtgctatatccactttccttcccaagactccaaggacattgagttgactaagccttccctccagcacatcctagggaaaaattcaagccaaagtcctttgatgaataaagtcaaaggaataatcaatagtccttctagcttctgtcactaacagtgagaagcataggtgaagccatggtcacaaaatagttaaagaagcctcctcccaccattcctcacaatctttctttcccacttcggcttggcagaatggctcccacaaagaaaggtggtgaaaagaagggtcgttttgctatcagtgagatggtgacctgggaatataccatcaacattcacaagcacatctctagagtgggctttaagaagcttgtctttcaggcactcaaagaaatctggaaatttgccatgaaagagatggggactccaggtgtgtgcattgataccagtctcaacaaagttttctgagccaaagaaataagggatgtcacataccatatccatgtgaagttgtccagaaaacataagaagatgaagattcactaaacataggtaaatattggttacctatgtgcttgtcaccacttaaaaaaatccatacgcaatcagtgtgaatgaaaactgttgattgttaaagttataaaacggcaaaaacaaaacaaaacaaaaaaaaaacgcagttaagggaacatccatttaacattgaccacctagtatgtaggagctaaacaataaacagttgttggtaccaaaaaaaccaatgtcgccagtgggcttgggcatggtgagggcatgtaaaaaactagaacaaccaggtgcagtgacttatgcctgtaattcctacattttgggaggccgaggcaggtggatcacctgaggtcaggagtttgagacccacctggctaacatggtgaaaccctgtctctaccaaaaattcaaaaattagccaggcatggtggcgcgtgcctataatcccagctactcaggaggctgaggcaggagaattgcttgaacccaggaggcggaggttgtggtgagccgggatcacgccactgcactccagcctgggcgacaagagcaaaactccgtctcagaaaaagaaaaaaaaaaaaattgaacaacccttttatttctgtgctagacagggcacagtccaggctacctggtgcatcaaatacctctgacctccagagcaacacgagcagctgaatttcaaaaataaaaagtggacagagaataagcacagctgctgacacaaataacctgatgtctgggtcctagctcatgctacacatatggccagcctggctattctttctctcatcttggccctgacaacagttgggaaattatggtccccttttctgttttgcatattcatagaaaatatctgtattctaacctgcccagctacagttacttcctctgtaactccttcctatccctatcattgtaaattaagttaattcagcaaagaagttaacaggaaggaagagagagagagaaatgagagagactgagagagggagacatggatgaaggagacggaggaagaaagagaaagaaagaaggaaagaggaaaaaggaaacaggaaggaaggaaggaattggaaggggaaggggaaggggagagaagggaagggaggggaggggaggggagggaaggaagggaggaagggaaggagggagggagagagagaaagagaaagaaaggaaaagaaagaaaggaaggaagaaggaaagaaagagaaagaaagaaaaagaaagaaagagaaaggaaggaaagaaaaagaagaaagaaggaaggaaagaaagaaagaaaaagaaagaaagaaagaaagaaagaaagaaagaaagagaaaagaaaagaaagaaagaaaagaaagaaagaaagaaagaaaaagaaagaaggaaaagaaaaagagaggcgtggtggctcacgcctgtaatcccaccactttgggaggccaaggcgggcagatcacaaggtcaagagatcaagacaatcctggtcaacatggtgaaaccccgtctctactaaaaatataaaaattagttgggcctgtaatcccagctactcgaaagcctgaggcaggagaatcactcgaacccaggaggtagaggttgcagtgagccaagatcatgccactgcactccagcctggtgacaaagcaagactccatcaaaaaaaacagaaagaaagaaagagagagcgggggagggagggagggagaaaggaaggaaggaagaaagtctgccatcataatcctccagcacatttcctttgtgtagggcaaatccatgtttatttatctataaactagcaactagggattaaaattttagctacctccttttttaacacctgaatcactaggggtacaggatttcatttaacttggtctgttttgtgaaatgcagaaagatgattttggaaaaaactaatataagcatttttttaaagtgtctagactgctacttaaaaagtaaagggtaacagttaaatggggcatgagctcctgaaactgtctttgatttaaataaagtgaagagcaacaagaaatgggttttaggttcaatctgtggcctggggaaaaaaaaagttggtgggggggggagtgaattatggccaaactatcaatgggcaccaatctgtctcactttttcagaccatttgaaatggtcataggtcataaaataaattattgttatttttaaaagggaattaacgccaggcacagtggctcgtgcctgtaattccagcaatttgagaggccaaggcacgcagatcacctgagatcaggcgtttgagaccagtctggccaacatggtgaaaccctgtctctactaaaaatacaaaaatttatcacggtggcacaatcccagctactcgggaggctgaggcaggagaatctgctgaggccgattggatgtttgataggcaggcacacacagcacagttttaacaagcaatttatcccctactgtgcaggtccctccccaggttccttataggctgagtactatgaggttacaattttcccggacttcgcctattgattgttgggtagggtctttagatgtttttttcagggttgttttgctgtattttgctgcagcccacaatacattgcaatcctagttaactagggggctcttcaagtatttgacttatgacctaagtagctgggcaggctgataagatcagacaaagcaagctattttgcaaactagtaaactttcattttaaactaaacttttttggtttgggtgagggcaactaaggctgacaagcaggctttggctatccaagcaggagcctagtatattctgttttttctggtagtttgctgaccaaagctgactgaaggcactttgtcttggaaatggaccattgtatatattatttccttcaattccctcgtctttttttttttgacccctattggtcccatttccacatttatttttgtgccctttggttcttacatttattaggcactcctttagggacatctattgatgttaacataaatgttggggttaaaagaatttgttagatttctccagctttggtagccatgtggatttttggggatcttatggaatgccaaggtgaatggaatggccaattgaactaaggcacaagtccctgtccagttggacagtaacaggtcacagaggctcctcttcccacaataccaccagacattagcccggggtatatgaagaaccaagtagttgcctttgtttgactcaccagcaacgtttaaaatgtggatacaagttgagagttttcccacgggcctattgaactttgctccctgcctaaagaggcaagaggagtggttcatattctctgtggagaacaaggggattgctttaggatctgaccttcgcaaggtgggaaagagcaataatagacttttgcaggttttatttccccatgcatccctgtcctgttatagagcctacatgcaacatattcctttgggatgggtatcacattctaggggaaatagaactacctgtgtctgagtctgcccagcagagcatgcataacagtcactcttatcaagagctagtatagaaaatttgacccatttaacccaggcatttatatccccatatccagtcttaatttctaaagtttccctcaagttagttaccttaattattttcactttcttagggtcattgtatggtgggttaaagaagtagtgggactgggagttacagtaatcctggtgtgcttagggtggagttggtaaccagtctaaaagctaactgtcccactggaggaattccttcctgagatatctattcctaatacatacctccaaggttcctggtctagagtagctgggttgtttacagtaattaatataggattgcattctaaatttctatagttaagtgccatggggccctcatatttgattctttaagggtttgtttttggaagaatgactcacccagcctcaatattgtgtggtccaccagacctgattccagctagcacagggcttttctgagagggtcaaataacggtctgttttaggatgtagatatttgtttgcttgtgacaactgcctttagttctctaaatttccacaaggtaagacttggcaggcattaaattttatagtttggagcaggtggaggtcttagctgtgttgactattggtttgattcgatattccctacttttcacccctaatactgggccctatccagtacttaggtctcctttcacaccttgtgttaggattcatcctaagcatatttacccccagtgacatagcctgctcatagcatcctcttaggttttccttagagttagcattaagggttccttacctgatatatacactctccatttacccttctcccttccttctgggggttcttttaccagtctcttgacccgagtgtcatgtgtccacccccggttcagctgttcgtacggccatttcagtgattaggagcacttgatggggaccttcccagcttgggtggagcttatcaccaggctggaaatggtaaacttgaacttaagaggcggggtttgagttagaagttcttttaacctaagggatgacagggtggaggatatggccagtatattatctcttcaaaattgctttttggttttcatagtaggaaggtcaatagtcctgcctaaatacgggaatgctttgaaatggccttaacccaggaggtcttccttcggtagtctgttttctaactacctttttgtttattctctggcaggttactcaatccccgcacacttgtttagcaagggtataaatctctatacactcatagttcttgactattgcatcacacatggcttggggaccccaatgacttcccttatgcagtatggacattagttctcttattatgggtttgcttattatttttcttccattagggagcacccatctcctgtccttagtttgagtggcccctaccttgcccagcttttcctcctcctctttagaaaattggggttttaataccaccttagggatgtttgggattaggttaaacaatttaactttttcctccagggaggcttgcttagcagctttatccacaagcctgtttcctacagcttctatagtgtttcctttttgatggccatttacatggaactatggctatctctgctggaagcaagaggctttttaaaaacttgtttgaccagtttcccatgtaccaattctttccacctgctatttattaggccctgctttgtccagatttttccaaaggtgtgtattattccataggcatatttggaattagtatatgtagtgacttcttggccttctaggagctttagggcctggttaagagcatataatttacaggtttgggctgaccagttattgggtaatttatcttttttacataaggattgtttgtttttattaacaacagcataatcattgtgttttttttaccatctatcacttgggatgacccatccacaaactgcctgattccattatgtagtggagtttctttaaggtttgatctaactttagtttgatattctatgatattttaagttatggtttggtgcctttttattctctcctttccataagaaactggctggatttaggttaggaaccttcccagggcccactgaccccaggaggaatttggggaggcaagggactgaccagctggactcccaggatgcctttagcccagctctgctgggtctgactctgggccaagaactgctgttttgaagagctgccagcctgtggcaccttccctgatgggcactcttatcagcaaaggcatccctggctccgccctcccttcctctttctttgcttcgaaggcaccatccatctctctggaaggccaagagctgcactgtttctattccatgccacccctgctggtgacctggcaactgcaaagggtctctggtttgtccagctctgggaggggactaagtggcttttcctcctcttcagctgcaaggatcctaccccggcccagcccggctctgggatacagagcttccatatatcccacctcaaagcatcttggcagacttctccccagcagatctctctctacttcagggattgcaaactgggaatttctgctcagctggcaagattccttgcccgggaggatgctatctctcccaattggtcatggctgcccttctaatcattcccctctcttccccagtaaacaaaatattcatgattgacattatcttagccgaagtataaaaactgagtcctaaaaattgatctagctgctttgctaatctgagagaatttcaagagtggcctcatttcttttttaaaattcctaacctcagtacttgttagaggtgcactcacaaatccatcccctcatggggacttctctaagagggtacctgttagatatctgctgtttagaagcaatagggaaattcttaatgttcttcttacattgctctaattatttcctcaattttggataaggatttagggaagcattgggtttagctccttcacaagccccgtatttctcttcctttggccttcttgttgccccttgatcttcctgtcccctactttctgagatgtatgggggcaagcgtgttaggggattccagggcttttcactgggcgaaggcgctttactatgctcttttcttcctttttaagggggaacatgggagttaatccaccaatccaacaaagcataactcatctcctcttatgagaatggggttttattattcacatagagaattaaagcttggcatacctcatctgagccaaacttaggctgaaagactgaaggctgacaaatgggctctttgggccagataaaacgcaatactttaatatcttttgcttttccttgtccctggtttgaggattatcccttcaaacctgcaacatttctccccagtggactatctgggagaatgtcacaaggggtctttttagttccctctttcttttgttccctagacctagaatttctggttcccattttcagttagtctctgtatctgagctttaccctctgtacttaactcccttactggagatttcttgcacacctctttgtattcaacctccctgactggcggtttcttgcacatcctgagtcctccaaaaatgtccaaccaccaaggcagtacatacagtccaattttcctaccttggctagtgcatgaggttgcctggttactgcagtgcctgcttttctccctgtgtcacttccgttgtctcctgaataacagtttcgggtttctctatggcttttgtggggagccgggacttccagagagagcaggccacataaaccaagtgggatgcatctcccctctcagtcggagcttcactccacgcaggcacagagatccccgtgtgggccatcgggttgtgaaaaacaaactcacccgtccaaactcaaaaatggactcagaccagagaacagcgaaagtgagactttaatgatggtcttgcaaggttgggtgtttagtagcacacgcagcacagttttaacaagcaatttatcccctactgctcaggtccctcccccagttccttataggctgactactatcgggttacaattttcccggacatgcctattgttggttgggtaggggcttcagatggttttctgggggaatgtcttgctgcattttgttgcagcccacaatgcattacaatcctagttagctcaggggctcttcaagtatttgacttatgacctaagtagctgggcaagctgataagaacagacaaagggagctattttgcaggctgataaactttcattttagactaaacttctttggttcaggtgagggcaactaaggctgacaagcaggcattggctatccaagcagggcctagtatatcctgttttctctgactagtttgctgacctaagccaatttaaggcattttgtcttggaaacggagcactgtatgtattatttccttcacttagtcacagataatatttaatgtaaaccagtgaaagactatgactttgtgtgcagatgatctaaaagctttgacagttttgaattgagattcccttggcagagaattttattgaagggttatgcctactgaggtgaacataaaggtctggaagccagaagtcataacatctgaagggacaactttctatttttaccaataagtcatatctatattattttggtacctaccacttaagaggcaactaaaagctaccaatatatagataaaaagacagaagagatagctagatagatagctagatagatagatagattgattgattgattgattttgggaggaagggtgtctttttttggtttgtgttttggcaagctagtgctaaaatcaaatgtgaaagcaattcagttaagactgttgagcattactctggtgagtactaaatacaatacacgtggttcttgccatgaaaacaagtgatttatattgattttttttcaacagctccaaagaataatgaactctttctagtgtcatgtggacttctctgtttctatttattttacagaggtcttcacatgttctgctgtgtctggcaatatgtgttgatgggttgatttattcatcttgttttccagtttgtaatgacagcttttaaattaagatacagttttaaaaggtggtaaataaatggataaggaagccccagtagacagaaataatgctattcaagatcccagcatgaaaacccctccctgagctattctgcaaaaccaatatgaataatctttaaaagttcctcacatcctgtttcacctagcctaaaacgtaatttaatggaatgattctacaaatggaatggacttactattcccagctggcatccatgaaaagtaaaaatctccatagagtttcaactaaaatgtcatcagatgattagagtgaatactcacaggctaaaaatttactcactgtttgctacaggaaagtgtttttttgtttgttttgtttgtttatttttttgaaacagaatcttgtgctgtcgcccagactggagtgcagtggcacaatatcggctcactgcaacctccgcctcctgggttcaagcaattctcctgcatcagcctcctgagtagctgggattacaggcacccaccaccatgaccggctatttttgtatttttaatagagacggggcttcaccatgttggccagcctggtctcaaactcatgacctcgggctaaccacctgatatggcctgacaaaatgctgggattgggattacaggtgggagcccgtgcccagtgaagaaagttgtttttactaatttcttttttctttttttttttttttgagacgaagtctcgctctgtcgcccaggctggagtgcagtggcgcgatctcagctcaccgcaagctccacctcttgggttcacgccattctcctgcctcagcctcccgaggagctgggactacaggcgcccatcaccacgcccggctaatttttttgtatttttagtagagacggggtttcacctgttagccaggatggtctcgatctgctgacctcgtaattcgcccgcctcggcttcccaaactgctgggattacaggggtgaaccactgtgcccggccgtttttaataattttttttcccatttgacatagttttgttttcctgcgtgtgtcttttcagagtggctttaacaatagctcaggctcctggaaatgaggtttaaaaagtaagatggcttggaaatgcaagacgtcaaatatacagagggaaaagtctctaagagtactctggtgaagagtgtatattttatttcctaagaagtcatttctgagagagtgcaaaaataataattaatattaattaattaaatgataaaacaaaaagtatttctacaaaccccaagaggaaacctctcgttacctttttatgtcattttggtgatgacctagtttaaaattcaaaggagataaaagtacagtgatgcttgttttttccttgtctcttgcttttttgcacctcctattcccctcgtgctttctaaagcctctttcatggctgactcctgcaattttaccattttgtctcagcagccctgtccctttccttattttccatatattccttctttgtaatacaaacatgttttgttgctcatatttgcattaggggttctaccattttaacaatatccacaggattctcctgctttttttatttttttgtcatttatagttcttgaagagcttttttacttaccccagaggataatctaccacttgtattacttctgacagatgaggattttaaatctttgcttattgtttgtcttagttttacttgtagttggcccccacagccctagatgcaatctcttgtgttttcacttatgcagatgtctgtaatgaaaggaaacacttgggaacaccacagagaaaacacagctattctactataaccagagccacagtgctaaatgatctccagcaaaaaataaaaataaaataaaacagaaggcgaattgaaagaagtgaaaggcttgcactgtaattcaaaagaactaaacagatgaggcatttataaggtcatgcacacaccagcataaatactgaagtagtccccataacactcatactctggaacgacttgtacattttctttttgtgaatatgcttcagcctataatctcataatagggataagagttctaacaacctttttatcttcacatgttggtgagtgttacattaaacaagaagaatttcacttttttgattaaatggacaaaaatgatactatgctgaagggttgcacaaaatattttcagcatcccaaagcccagttaaaagggatggattcagctgggcatagtggctcacacctgtaatcccagcactctgggaggctgaggtgggcggatcacctgaggttaggagttcgagaccagcctgatcaacatggagaaaccccatatctactaaaaatacaaaatttgccaggcgtggtggcgcatgcctataatcccagctactcaggaggctgaggcaagagaatctcttgaacccaggaggtgaaggctgcagtgagccgaggttgcaccattgcactccagcctgggcaacaagagcaagtctcaaaaaaaaaaaaaaaaaaaaaaaaaaaaggcggggggagtggattcatgcaattgtcatcacaaatgctgtagaaattcattgacttttcttgttttgtaggttagacagaactgacagtgatctactgaatcactttcaaagccaaaatctaatgcttttactttgaaatatcaccagaataaaccggccaccatcatcctgtatataaaattttctcatctaacatataattcccttttttcaaatattgaaacatgtatatagtttcattatacatgtaaacatgtaaaaataatggaacatgtaaatagttcaattatttcagaggccaaacatttggacaatttaggtaaaattactcttctatatgtatccttctaaaattaatccttaaagtggcctatagatttagttttcttgaaatttctgagttacaaacacattcaatgtttcttttgggccctttgtttattgtcatatagcaatgtaaattacttgagaatgaaatagtggttaggtagaatcatgaatacatgtaaataaaaccagctactgctactcattagatgtactgttctgtcaagaaacaaccacgacgtcacatttattaaaagtaatgataatacttagacaattaataaggtctggactgttttcagattctttgaaacccacaaataaccattaaaaaggaaatctgggaaaaactagaatttaaaagacatgcttaaaaatcgaatatgaaaaatgaaaaaacagcattttaaaatatacgttctatcatgacaattgaaattattttaactcgttaatattcatcattttgtgctcagaaatatttgaagggtaatattctaaatggtgctttttgctattaatacattaacattattgctacatcttaaacatgtttatcaaaaaatttctaatccaaaaattcaacaccaatgttgcccttgagggacattacttctaatcatacttatataatgtggccttaggaattacttttctagtgaactaaaaaccagttcaagccctaaaccatgaggcaagtgtataaatcctgcctacaaaaagaaaagtgtttgcagctaactggtagacaaatcaatgagttccttgatccatgtagatatgaaccattaacaaatgatgcagtgagaaaaaggactttctcagttagttgtcggtgtattttgtgacaaggcaaaaataacgtttagataaaagaagacctaaggtgaaatgtgtggaattgatctcatccccacaggcctggcttgacttgtgtaagagactttgtgtgtgaatgcatatgttttcatttgtcagtggtgattcttaaaaggtttgtgcataagtgattttctctcaccagtagacttgaattaagtgaagcattaaggaaataaatttgtctccactgaaaagacaagtttctaactattttgtaaaatctcatctaaatgaatagagtttcactttggtgaagaggtttattcttagaaagaactcccaattctttatactccagttctgtaaaaaaaaaaaaaaaaaaaaaaaaatcaggtgctttccatgtgcttgacaaatagtaaatgtttaatgaatactgttgaatttcataaagaaattcaaaattcaatgttgacatagaatagagtttggttagtgttaacaataaatgaaagaaaacaatggaaaatgaagcaaactttctagattaaggaaatgtataattgcatttaatctggaataatgtacagaaagtcagaaaatatataaaaaattgcagtggttgcatcttaaagggattacaaaaagtgaatatttagacttacaaaatcaattactaatattatgaaacacatctgtattttaaacataatatattaaatatatctcataaaaattcttccaatatttcattaacatgttttttcatgaagtgttaattacactgaagaggagcaaaaatggagggagcaataataaagcaattctaccatattagaattgattaaaaatcaataatgcaatagattaaacacctcttaaatggtaatatgggaatagaaaaatgcaacgtggtttgctaaacttccggttatacatatttttccagagaggtggcaggatatattggaaagggcactctcccactacctgggtttggtgatgtttcttgtacccacaagaatggcatgattgtggcagtagctttgccaacctctcagggtaatatctgaagtccaagctttgccgacctctcaggctaatatctgaagtccagtcaacttgtaaaacaaatatttatgtttgtcagtgtcaggttgttgaaccccagacaagtcaattaataagctctctgcactttgtaggtgtagcagtagagccatgacctacaatagctctttttcataactgaaaataattattatcaccatttcacagattaaaaatctgagctttacagaggtgcagtaacttgcccaaggccaccatcactagagctgtgattctgaactcaggcctgattcccagcaacatatattaatactttccctttctgactttcgattttcttgatgtctcaaagttttctgccttgtttgtaaaatgaacaacatatcatctaattcaaaaccttgtcaggatgaaattaggaacaatagatgatacataaagggcataactcaatccctggcatatataaaattcttttaaaaaacaaatatttgttactctaagatcaaatggctagcaaggaaacactacagaatcatggtcaagggggcctgctttaggctgagactcactgggctggggccatgtcccacctttgccccttattacatataaccttgagcaatacatcagctcccctgtggctctcttttgtaaatgggagttataacttgatctctctcattaacctgtttgaggattaaatgaaataacacatgaaaagtatgttacctgcgacataaggagcacctgtggtaatgcagaaatattttgtaaagcatttaaatattctacattatttgtcttcatttaaatttataatcatagacagaaagctaaaataagatttcagaaaacaatcatttttccatgacatgtaattcaatacaataacatccctttatgaaaactaatagtaccacagctaaaaataaggaagctatgcaaatgatatgacacattttatagtggatacatacagggttcatattttaatttaaaaaatgtctttgtgttttttttagatgaaaaaaagttccaaagaccatgtttgaaaagtcaatctttaaatgtgttccagtaattacccaggcaatctaaaattgatatgattgattgaaataattgattgcagcctgccaactttacctttcttaattataaaatacaatttcagtttcgtgccttccaaaccaaggtttacaaaagctaagagaactattccgttcagcctctgattatatcagcagtgccatttttcaggtcctatcagattgggtttggatgataattacttggagagtgtttgatctcaataatgaatacatgattagtttttcatgaaatcagtcaaccacaccgcacagcactactcatgtgagaccttgttgatttagctgttagaaagcacacatttccctcggttcatatatgggacatcagtctttggggaaaagagggtagaaaaaggccaagtttatgggtaatgatattgcagagtcaggtatttaagatttgctaattttcttctcagttatactcatgacttacctcgttgtcatacctactacatgaccacagtttctatctcagttgtggcatatattgttttgttttttcaaaagaaagaaaaagattttatgacactattgttatctctcaaccccttagagggttttgcctcgatgaataatattttatatgtgaaatgtttatgtgatttttcatggagtgataaccccactactgcttaactttgatgcattgcaatcactggttttcttcactaaagtgcttttacacacccctcccataaattgacttaagagttagaaatggaacatacgacacaacttggatgctcaatggaaaattgcctaagaaagtattttatgttaggtttacaaagtaatacatacacacacacacacacacacacacacacacacacacacacactttttctagaaggcctggtttgaggatgttgtgtttctttgttgatttgtgtctgtgtatatgtgtgtttttctacgatataagctgtttctctgagtcaatataacttgcattttcttaaatttcaagtgatcatattcaaagatcagataaaaggatccagttgtcagtctttaaacagcatgcatttgtttaaaaagatagaagcattgaactttgaaagaaaaagaaaataaattctgtttattttctgtatttgtctgatgttattgacttaagaaaagtcctacaataaaaattctttagattatttttaatgaaaagatactttataaatgtaaagttttaaatttttagctaattttcataattaaaaagtcactttgaagaaagattatatataccatgtatttctatttaatttggattattctgtttcaaaaaaaaatctttatcacagtgtcaaataatacttttgccaagacatgtccagttttttagggtaaaggaagtaactattttggaaacctatctgaatgttttgaaatctaaactctagttttaattccataactgagacattgggacattttataccagggtttctcaacctgaaagctactgacattttagaccagatcatgacacttctttgttgtgaaggactgtcctgtgcatttttaccaggttcccctctacccactagatgccagtggcacctccatgccaatcttatcacgtctctagatatcgacaaatgtcctttggggtcagtgttgccccaactgagaactattttagacaaaaagcactggagagatgggcttaaattattcaaataatgagaacctaatttttcttattggaaggggtgggggtggtaaagaatgatacagacttatattatttctttcacagaaatcagtcactagtgcatgttaataaacgatgtttgtccaatagattaagaataggccctgaataatatgcaaatgccaatggctacttagtaccatagcctctcttccattatataaggcagttctacatctgaaacttagcattttgaataaaaaaagattagaaaaataagttcaaaaaacataagaattaaaagagcagacagtttatttggatgatagtctttaataaaactgataaattactatgaggtcatttattaatgtaaattatttaagcatattcttattgcactaggaaaagatacaatgcctttacaatattgtgaatatagccaaatttataaaatgagcagaaaccctgatgtagttgaggaaagattatctcaatgctataaaatcttcattgactctgacttagctattatctcattattcctttccaaaggaagaacactgtcaggatgacaatacaaacaaacctatagtggagtccagtttttgtcatttggaactaggaaatgcatgtctgtattgaatagcaaccaccatagcaaagacataaatgccactgatttggaataataaattttaggacatggcagactcagatcagtgtaataaactcaaacattgattttacatttagaaaacatatatctaacactagaccataagagatacctgggattggtttctcttccagcagagtcataggactttgaaagagaatctatagtacttatcttattttagtctaaaatgaaactgaaatgcaattatgacaaatagattcttattactattgccaaagatatgggttgactatcaatgcaattacttgttgtattaaaaatgatgttgataacattggtttgaaaacgtttttccaaaactaaaaatataaaataaaataaaggtttttccaatgttctactctaatatttcttcaagatctttaaaccagcctgttagctagtttaaataatggtttaataatagctaaaataggtaacacaaaataagcttttgcaatgtaccaagcagtgccataaactcttgacatatatcatctcatttaatctttaaaacaaccctatgtggtaggtccctcattactacccttatttgcaaatgaggaacccgcagggaagagatattaagcaatgcttcccttggtcaactagttagaaatgcagatgggatttgaacaagacagactatccccagattttgctctcttaactaataacctatagctatatcatctatattgatatgtctgtaaaataaatggtgtaaaactattacttaagccatgactttggtgaactgaggcccagaaagattaagtaatatgcttagatcaaataactgaaacaaaggccatcaattttgaacagaatttttaatccttaattcataactagaataccactaatctaccatggacacgcatatgcatctatatcattcttccaaatagcggtaatggttttgctttgatccacatccagacacactttcttggaggagtactatttgtgaccaagagcacacatttgtgagctagctctcgttgaggagttagcctatggcctggaaacacagcaatgctgaacagcagacacagaacgaactgccgccttgacctcgttagccataccagctaaactaactggctgcagagaagtgaaagcatgctaaaacagggaactaaaaaaaaaaagtggagaaacacagtacattgtcttcttttgctgggtgatgtttctttcttggttattaatcacaaattataatggaattctaatttctaactagatccctagagatcaactctgggtcttaatgaattgtcaccattccactgatatcaagaaaaatggataaaagtgcacaaagtcttataatatcagtactgtcccaggaatgaatgctagcaaagctagcagcatgatagcccactcccatgtcacaaggagttactgctaagctaaatgctccttcacctcacacgtattgaaaaactttgtggacaaaactatacttctttagtctggctcacatttaaatcaagtgctttggaatgatgaatagattcattgcttagggtaaggaggcagctgcttggcgcaccatgactggagggctggggcttcaactacttttgccacgagatgcctcccctcaggcattgtggatcatttctgcacaaggagttgccttgggtggtaggctaataggagcaacaccagggttcccgtgacagtgttcatataagtaagtgactggagatagatttattaatagaaacaataaggagggaaacaataaggaggttaggaaacaggagaaaaattattctggtaataatgtggggtctccaatcaagcccaggttaagggagacttgtctttaaataacagtgaaaaatcaggctttctctatgagaccagagtaaagccacctttctatataggaatttaaaatgtttatagccctagggaataaacacagacctctgaatcaaggacaggtgtgcaatataagacttgcctacgtatcacaaaaaaaaaatataagaaatttacattaagcatccttctgagcaagagatgatccagctaagatgctgcttctgactgccgagaaaatagaggctaaaattacagaccaataaataatcttcacataatgaaaggatggagaggactctgctccagctgaatgaggatggcccttcatgaattattaggagggactagagtgtgtggaaaggtgggagtcccattatgtgtcttacagattctaggcatcttccttgggtcatttcattgactcctgaaaataactcttaaaagtgaaaaaaatgaaggctcagaatgacgaagcaatttgtctgggatctcagggtttagctagtaagtagtagagagaagagtaaactcaagtctggcttcttttcctatatcaaactttctttggtccttcttttgatctaggccaacattttagtatctttcctagatcgtgtgtcactggctgctctgttttcatcatctactctctagcccatggcccagactgattgggttattctcttcagtcagttacatcccagggaaggaaagacaccatcatagctttcctggaggtgagcaagatacaggaatcagacctctcttgcctatagttgtggtatttagcggtggaagacaataatgaatctgttgtcttgatggaacacaaaggtcagagacaagataaacaggaattttatctgaggaattccgaaggcagcaagcagaaactggggatggccttacatgaggttttcccaggctgacttgaatggacctttcaggtacatctaaaaggtccaaaatgaaatggaccctggtttcaatactgatccatgctatttacaatggaccgatcagtttctgtggcagaagtaaaacaccagtaagaaagaattttccatctgtgtatggaaactatacggttcccctttgattattcagtctttgttatttcatatggttccttaactctgcctatttcagtccccattagcacttcacagatttcaaaaactgctggaagtcaatcatgccctcattgctgtctaatactagtgacaatgctccacagctgctctttccagattcagtgggagtgtgaaaaatgccgctccacccacagcccctaagcctttggcaacttaatattttgaagtttaagctctgctccctgaaaggctcaatcccattatcagcggattccttactatatggcataacatatattccttacaatactccttactatatagcataacatactatactaacatatagtgtgttttgttattctggctgaagtcatttcaatctacatgagctatggttggaacaatccaatgctctcaattgcactatttgcatattgcccccttatacataggcttcaggattatatttaaggctctgagccagactgggaggaaaacaaggaaatctaataaatggtttctgccctgaaggcctctgatcatctagttgaataaacaggcaaactttaaaccaaaagagcgggagttctgagaatgttgttcaaatgccaatcctaggtacacaacattgattgttttctctttgtcccccattaaatgttagaaggtggcactggataaatgactgtaaaaattttatataataatggaattattttgttggtgaattcttactggaatctcagtatttaattttacaagatgggttttgataataacagtaatgatgaagaaatagttgaaagattgctgttttaataagtattggggatgagactcagagccttatttacttgacatcctccaaaaaccactgcacttcaccttatcctaccatgatgtctcccaaggaagctccaaaggacacagtgtaggatccacttagtctgatcatgcgtttatttccttctagctcctatccacagcttcttaagcagctaaccaagataaattatgagagaagaccatcagagataatataagacgatacatttttacaagaataatacagaaaataagaactgtgagttcagagagcaagcaatcattgtactcctgcaaagcaggctttcagggcttcacatagaaggagaagctttaaatgatgagtagacagaaaaatggacttttcagggagttccaaggaagggcacaaagatgctgaggctgaacttaaaaggacatgctttggcaggatgcagtggctccctctggtaatcccagcactttgtgaggccatggctggaggatctcttgagctcaggagttcgagaccggcctggccaacgtggtgaaaccctgtctctacaaaaaatacaaaaattagccggtcatggtggtgcattcctgtaggtccagctactcaggagactgaagtgggaagatcatgaatccgggaggcagaggttgctgtgagctgagatcacaccactgtactccagcctgggtgatacagcaagaccctgtctcaaaaaaaaaaaaaaaaaaaaaaaaagacacacttaaggaatgataatagtgccttaaattattggaaactcccgactgccagggatgatgtggagttttgacataaccacaatcctcacagccatccagtgagataggtacgattaacccaagataggagaactgaggctcaggaagctgaatagaaacctctccaaagtcacacaactctaggaattagtggtttctcaattggctctgcctgacttgagttcacactgtaaatcactctgctgtcacaccgggtgtgcatatgggattagacaaaaataaagctatgaagaccggttggggtcagagtgcagaagaacatgatttcctgggtatggagttgtttgctgtttatcctctagatgaggaagagacatcaaagttttgtggacagtgaaatagcatgctcaaattgtattttaagatgattttgttctagttttattggacttgttttgataggatgcatgcactaaaatcaggagtgttgttaattgtactgtgttgttttactaaaatctagtttacaatgacattatctgtcatagattaccaagcacacagtgattgcattggaaggacaaaatcaaaattttctacattgttagcttttatttctcttttagagaaagttcttttctgtatataacacattaatttaattttatttattttttataacttcaactttcattttagattcaagaggtacacatataggtttgtgtaatagttactttacactgctaataaagacatacctgagactgggtaatttatcaagaaaaagagatttaatggactcacagttcctcatggctggggaggcctcacaatcatggtgggaggcaaaggagaagcaaaggcatgtcttatacagcgacaggcaagacagaatgagaaccaagggaaaggggaaatatagaaccatcagatctcgtgagacttattcactaccatgaggacagtatgggggaaaccaccccatgattcaattatctcccaccaggtccctcccacaacacgtgggaattatgggagctataattcatgatgaaatttgggtgcatattgtgtgctgttgaggtttggggtacaatttatcctgtcatccagatactgagcatagtacccaataattattcaacctttctccctgcacccacctaatactccccagcatctactgttgccatccttatgtccatgagtacccagtgtttagcttccacttataaatgagaacatgtggtatttggttttctgttcctgcattaatttgcttaggataatgaacttcagctctatccaatgcttgaaagctttaaagttaagttaccattggaatatattgagctagaattgttcatgtgtcctatattttccgtcaatcaatggccgcatttgctatttgtttcctaagtcaaaatgatcattgaaatgagccaattctgctctttaaaactttaacatattctagctagatgaaaaactttataaaagtttgtgcttattgtttttatatcctataattatagagaaatagctagaaattatagtttatttaaacattaccatatttaaacaataatagggaggtaagtaaaacagaaagtcctaagaatctatggcagactttttgctgtcgaattttaaagaaatgccaaacacataaaaccagataaccactgaaatgtgtacataccagtttcccagacttcaatgatacatataatgtttttagacagcctttgtgtacagttgtttggaatcattttgtcacttttaacaaatatcatgttcaaaaattgtcagtttcataatagctgattctgactaagcttatgctatgatccagatatcattaattcattcattcatttgacaaatatttgttgaaaatttaatagatgctaagacactgttagcagtattctaaatgctgggtaaatagtactgaataagacacataaataccttggcatcatggggctttcatctagtaagggaccctggcaggtatgtgtctcatccagagcattttcaagatatgaagtcagtattacatgttttatgctgatgggaatgatagaagaaactatgatgaggggcagcaattgtaggtattgatgtcttgattagataagaaaggaggaaattagagcatacatgcatttatctggctctaaaattttcattctttacatgccattatagcaatatttttttaaaaagatttaagtgtttgggactttaggaaatatacatatatattttatatttttaaatatatatatttttctatatatatatatatgtaaacttccaaggaaaatgaatacagaatggtttagcatctagctcaagagggatgccattcagcatgcatgaaaaagagaacaagcgtatgttaaaatttgagatacatcatgacgagggtccaagtgggactatgtgaatggaaagatggagttgaaagaaagcagagagacacagacatgaaaggagagagaagcagatggctaaatatccctaaggtggagaagttattgaccaaagtgagtcatttaacaaaggtccattcatttacaaaggaccacaatgatgtgttttaattttttaagttgtcctttcaaagcattttgagctttcaccacctcaaaaggcacgttagtaaattaagcataaatgttatagatgcaagtatagtcattttaaacacaaagttgtagaatggatgattctatgatttacgcatttgacatttctatataacattcattgatagaacatactcatttgagttgatacataatcacatgatatttgcttgttagaaataatcaaaattctattattatgtttacactaactagaggtgaagatttaagaaaattcttcattttccaggtaataaaggcagtaccgatctggatcccttgataccagaaaagctttttgcaagattaaatgggattaccatcaataggccctcagggtgtttggatttgaattaaaatatggaaaccttattaacaaaatttacattcctcccttaaccttaatctaattttactggtatcttggcctctaatatacagcaattctgcagaaaggtgcatggcttataacccatttttgtcatcctaatcagaagtcactgatcattccagaggaaaatagatgcatgaattttaaactggtcatcacgttcacgttttttaaaaaaagtattacaaaccaatattttattcatgaaaacattaaatattatattactagcaaaacattttctggtgccttgaaatttattctagaaggaagagttttcttttacttctcacctaagtgctgttcttcagctgactatgctccatattccccaagaccactgacagtggcttcattctctaacaggaacaatttacctggaccctctgcagacaaggccttcacccccaaggaattgcattaatagtgataatttcatgcactgacactggcaacgggctttatggagaagacaaaggggccttggaatttcaccttctcttacggggaattacttctactgtcatttgtaggagccaggacagaaagggtggggccccaaggtgaaatatggaaataaattgctttgagacattctcaatgatccatgtttcaacagtcacggaaatagccacttataaatagtcactcatatttaaatggccaagcaaatgaaataattgaagctggagagggaggccacattattgagtccaatatgcttatcctcataatttaagtactgcagaacaatatactgacagttatgtctcaaaatcaatgaaaatatattcattttacaacaaaattgccatagattctaattcagaattccaattcagaaaacattcatacagaatatcttctaagtttcaaaaatgtatccatccagaattttctacatgactatcctagccaagcttttataaagctaagaaaaattagatagaagacaatatcctcagcttgtttgttctctagaaaagaggatagttttgtgtattctactcttaatttatggtagagacagacaattcaccaagtttttttttaagtatatgaaactggaggtgtatatgtgcactaagatatcttagatatattctcccaaagcatgagtgccatgtgaccatatcctttggaggtgacatcttataatgcctggttctcaacagagaatttggaagagcagtttttgtgattatattaagagttacaattatcaaaatgaaaaagtctaagaattgggagggtggggatgggggatcctgccaacttcggttttgctacagataagctttgtctacagctaactcagagagagaatatgaggtcaaaggaaaattcgttctgaaaaattgaaaaagcaactccagcttattgtgatgttacagaatagtgctaagagacatataatacaagtcataaattgagtcacacatcgttttacatattctaagtcactttttaaaaagtaaaaaacagataaaactaactttcataaaatctataacccaatgtattcagaataatatcattttaacatataattcatataaaaatgaatgagatatttacattattttcccatactaagtcttcaaaatacattgtatttacacatacaccacagctccatttgggctaaccatctttcaagtgttcaataccccacgtgtggccagtggctaccaacatagatagcacagttttatagtataaacacacaaataatttctctttcttttgttctgagttcctgccttctttcctccctccctcttctcctatctcccttcctttctctattttatccctttcttctttccttcctgtcttcttctcttcatcttccttcctcctagtcattctttctctctctctctctctgtctccttctgtctatgagtgctctatatgctaaggatacaatagtaataactacaggcctggactcgaaatcatgaaaatgattttttttataaaaaacgctacagataccatttaaagacacatgaaatcatactcactagttaaaaatccagccacaaatatggctacaagagaaagtgtgcagcatgaacaattacacaattcacagtatacatggtccagcattgctaagataactcaaaccaattgctctagagaactatcctcttctgtctttataaatctgaactattataccaaggtaaaatatgaatacaaaatggtggcctactctataaagggtgtctgtggtgcttttttcagatttactggaagaattaagactctgctctacaacacactagaaaccagagtctatcagtactatctgaaacccttatgcaatatctgtgataaaaactgatctttatgaaaagacttggatcctgaaaaatttaagaaaaattgaactggtagtattgttttactattccatgctttttctgcaattcaaattatctaacaggtggtcaaccttcttattatatgtccaaaacaataagcctcttactatctaaccccgaaagactacagtggtatcatggagccagaactaaactttgtgaacataaaatgatgaaaatccattaaaaatgtaatgcaaaaaataaactataaaacaaaagtgttataactccattcaaaaaataaatgcactatatttttgaaaatcagtaagtaaatatattagagcaaattttatttaccacacaaaatatgaagaactcaacaataaaataagaaatgataaattcttggggtgacagatgccccatttaccctaaagtgtctattaaacattgtatgcctgtatcaaaatatctcatatatcccataaatgtatgcatctattatgtacccatacaaaataaaaattttaaaaaatttaaaacagaacatttatcaagattttcaaaaataatgatagcaattttaagcgcattggatgtcttcaaaccaatattcaggttctttaaaaactgaagcttggctggttgcagttgttcacacttgtaattccagcactttgggaggctgaggtgcttaaggccaggagttcaaggcaagcatgggtaacatggcaatatctctacatttttttcttttagttagttagtagggagcggtggcacatgcctgtggtcatagctatgccagagactgaggcaggaggatatttgagcccaggagttccaggctacagtgagctatgatcatgccactttactccagcctaggtgacaaagcaagaccctgcctcttaaaaaaaaaaaaaagaaagaaactcatctcttatgtgacataaagggaaagattcatatacatttaactataaaaagtattagaaatatttacttatgctacagaatatcatttttaaatagaatgttaacatttctaaacaaactacattaacatgtacttctctaatcaggtaaccaaggctgaatatgcaagtcctcaaaatggggagctaccttaggatcaggactagactctcctttaataagaaaaggtctcagatagatcgtctcaatcactcctaaaaataaaaatttaggattttaatagatcctaaggctcacaaagtgtggccgtcctccccgatcccaagcacacacaatagaccatgaattactctaccttgactttagtctcatccaaaggcgaaagggacaaaagaaaagaattgcaggcattatatttaaaatatatatatatattgatattatgtaccattatgttcactagaagacaacaactaaaatatcaatacttcccaaaggcaaaatgaaatggctaaagatgtatttattgatttctaaagaaatattactaagacactggaataataactcaccactattgtcattgaaaaggtcttggctctttccaaagctggggacagatatccagaatatatgatggtgttcaaatgttgtgttgtggaacatacttgaattgaggacagagggatttaacctgaacccaatctattctttatattttctcttattgttgttctctatttcttttaaaacattgaaaattgtaattaattactttgaaatccagtgtgaagccgcaatcactatccatcaacttgtgttgacataatgcatttatacattgaaacctttctaaaaatacatgcaggatgggtatagagaaacttgtatacgcaggaaaattgccacgcactctatggggaactggaattttttttctcaaataaaaggaatacatgtaatgacatattttttttctttttggttgacaattgtctcccttttctgtagatcctaatggtcaaataatggatcttgccaaccattatgagcttcaccccagctggggacccataacttttattgtggtccattatctggccattagaggccacaagtgtcttcaacacaattgtgtaacattttgctgaggaaaaggtgtggaaactgtggaggcagcaggttttctagtatctaaacccatggaaactccaaaacctcctatattgagaccattcattttccttatgctgaaatttttacagtgtatgcctcttaaataaagtttgcttatccagccttattgggaaaccaaatattcaactcagaactggcatgaaaccattccccttttccttttttggagcaattctgatgctaagtggatttgttatatctatttagcttttaagctctaattagcttagaaacaatattcttttgtttcgtttgtttcctatttttgttgttgttgttgtttgagacagggtttcactctgtcgctgaggttggagtgcaatggcatgatctcagctcactgcagtctctgccttctgggttcaagtgattctcccacctcagcctcccaagtagctggaactacagacatgtgccatcacactcagctaatttttttgtattttttggtagaaatggggcttcaccatgttggccaggctggtcttgaactcctgacctcaagtgatccacgtgcctcggctcccaaagtgctgggattacaggcatgagcctccgtgcccaaccttgtttgtttcctgttttttaagctttattgaggtacaactgacatacaaaaaaattgcacacatttaatttattcatcttgatgagtttggacatatgcatacgcacccatgaaatcatcactacaaagatggtactaagcatatccgtcacctccaaaaattttgtgttcttttgtgagtttgtctgatttttagttgtttttgcaaaatcacttaacatgacatctatcctcttagcatattttaaagtgcacaatgccatattattaactgtaggtattatgtgtacagcagatctctaggacttattagagaagagaaactttactaccattgaggaacaattccccatatcccttgccctcatcccctggtgattatcattctattctctgtatctataagtttgactattttaggtacctcatgtaagtagaatgtttctgtttttgtccttctgtgactgtcttttttcacttaccattaatgtcctctagtcataaccatattattgcaaatagcaagactttttttcttttcaaagactaaataatattccattgtatgtacataccacatttttattcatctgttgatggacagttgtgttgttcccatatcttggctactgtgaacaatgctgcaattaacaagggatagaaacacctttttgagatcctgatttcaattattttgtatctatacccacaagtgggattgctgaatcatatggtattttttaatttggagagaaacatcaaacttttctgtggaggctacaccattctacattcccaccaacagtgtttaagggtgccagtttctctacatccttgctaacatttatctttggtttgatttgtttctttgctagtttgttttttatagtagccatcctagccaatgtagttttaattcacatttctctgaagtgatgttgagcaccttttcatatacctcttggccatttgtatatcttctttggagaaatgcctgaatagacaatatgttctgaccttagagaagatcacagttaggtcagtggagtaaatctgctgacctgactgtgagtgaaacaattagaatgaggatgacttgcagctctcaagaccagcactaaatacacatggcctgccctaagattttatgactgctgcaaaaataggagaaactcaaataacattaagtaaagcctcttgtctgtatgtgtttccttgtttaagaaaacaagcacaccattttagctactgttccctttgttagctattggcaaactctttgttacaccttccaatcaccaacgtcatgattactttctatttgtattatccctttgatcatttccacacactttgattaacttaaaaagaagcatagttcaagatgctgcatgttttgatgccaattttggcccacctttcatctaaagggtgggaagagcagattgctgtattttttgagcataatgtagagtatatggagcttagtaatagctcaagtgcttcataagtaataaaataaatacttctcacttctcttgtcatccatctcccaattctctaatatttttgaaaagccttatggctggcaaaaattggtgattatgcccagcttaattcttacatcaaacattacatcttccattagcaggagcgtaggtgggaagtctttaggttaagcccattctctgtaacatcctgacccaagggcaaagagaccattactgacactgctctaatggttttctcctgctttctgtgacgctaaaagtctggaagcttaattaggaaagggccaacagatcacttcatgggtattccccaaagagggtcatttgtgttttcactgtgaaataccatctatatccaatggccattcaaaaatatgtaatcaactacatttagtaagcaactactgtgtgccagaccgtgttttggatgtcaggctattgtgttaaacaagatggataaaaattcttcctctactagtgttttctcccagtgaagaaaagcagaaaaaatagaaataattagataagaaatatcagacaattgctataaggagaatggaaatattttattgagggatgtccattttatactaggtagataggaaagacctgtgtttgagatggtgacatttattataagaagcaagctgccataaaatatctgataataaacatttcatgcagaaggaagttggggcaaaggctccagaacttcatgagtttaacatcctctgggaatagatagtgtggcaggagcagagagaccagacgtgaagacagaggaggaacaatcataaagtgggaagaaagctagatgggatggtgccaggcaaggttagccaggagagcaggagccaaaaaatggtttcaatgttattgcaactaagtgtaactgaaagtcttagaagtgttcaagcagggttgtagttttgtacaacttttttcttttctaaaaaacgccattcttttcacgttgtggaggattaattttctgaaaggggatgtggttaagactgggtatgaaagatcggttaggagaccactgcaataatccaggaactactaaactcatcctggtttaaactggggtagaagtgatgatggtggaaaaaagggtaagggttcaggatatagtctagctataaagttgaaagagttgctagagttttagaagtgaataagataaaagaaacaagaaaattataatttgtctttaacaacttggtagtttattgagatgaggggaagagtagcatggaggtgtgaattctgtgcttacacattccatttaatgtggaaacacacccacagccacctagtcacatgtgcacaagtgtggacacacacataatctctattatgttatatataccatatacaatatggtatgtacatgtttatgtatatatttgagagacagatataggtctgcgctttcacagagcccaaggtttcaaggcatttctttcctttaaaatgcattcaccaagtttagtggttatattggtgttgacagtttattaatccatatatatacacatatatataattctatattgtggcagttatattattatccagagaatgagaagttattcaaagagaattttccaatgattgcattcagagcctgtggcataacacttaatatatgcttcctaatcacttttccttaatatgagaatgcctgattaaattatacacacacaaacctgcatatgtataaaaatacattcccatatgtatatacatatatatgtattatgtatacttatatgtagaaatgcatgaagtattttttattaaaatacatttatacactttactattggacaaaaaaaatttacttacacagtttttagccctttctatggttctatgcaattcttgtttattttctttatgcataattactaatattttctgcccatgcctatatcctgaatggtattgcctaggttttcttctaggatttttatggtttggggtttacatttaagtctttaatccatcctgagttaatttttgtataaggtgtaaggaaggggtccaatttcagttttctgcatatggctagccagactttatgaaaaaaaaacagcaaaagcaattgcaacaaaagccaaaatttacaactgggatctaattaaactaaagggtttctgcacagcaaaagaaactaccatcagaatgaacaggaaacctacagaatgggagaaaatttttgcaatctacccatctgacaaaggtctaatacccagaatttacaaggaatttaaacaaatttacaagaaaaaaacaacctcatcaaaaagtgggcaaaggatatgaacagacacttctcaaaagaagacgtttccatgccaacaaacatgtgaaaaaaagctcaacatccgggcgcctgtagtcccagctactggggaggctgaggcaggagaatggtgtgaacccaggaggcggagcttgcagtgagcctaggtagcgccactgcactccagcctgggcgtgaaagagcgagactctgtctcaaaaaaaaaaaaaaaaaaaaagctcaacatcactgaccatcagagaaatgcaaatcaaaaccacaatgagataccatctcatgccagtcagaatggtgattattaaaaagtcaggaaacaatagatgctggcaaggctgtagagaaatcggaacacttttacattgttggtgggactgtaaattagttcgaccattgtggaaaacagtatggtgattcctcaaggatctagaaccagagataccatttgacccagcaatcccattaccgggtacatacccaaagtaatataaatcattctactgtaaagacacatgcacacatatgtttattgcagcactatttacaatagcaaagacttgaaaccaacccaaatgcccatcagtgatagactggataaagaaaatgtggcccatatataccatggaatactatgcagccataaaaaagagaacatttattttgcagggcatggatgaagctggaagccatcatcctcagcaaactaacacaggaacagaaaaccaaacaccacatgttctcactcataattgggagttgaacaataagaacacatggacacagacaagggaatgacacacaccagggcctgttggggggtagggggtgaggggagggaacctagaggatgggtcaataggtgcagcaaaccaccatagcatacatatacctgtgtaacaaacctgcacgttctgcacatgtatcccgtttttttgttttctttttttaagaaaaaagaaagatgttttctggagaatgttcttgctttttttgaaaaggtacatctagaacatctggctctctcatattttattgtcataactagtaaaccggagtattcatacctaccagagtaacttttctaaaacacatacccaatcacattttcaccatcaaagctcttccctgtcttcttactgccgtgagaccaagttctaacaatactataggttatataaagccttttttcactcagactctggctgcttttacagcctcttctatcatcagacaagctaacatcctgtgttttagttgtgagaatcctatgtgccatttgtgcctaaagatgcagatgcctgattctgttttataccattaaccctttgctcagcaccactctttcttcttgcaaagcatttccctgtccctcagcattccctgcccttagaccattcccagttttattttatgttattaatttttttttagagacagggtattgctttgtggcccaggctggactatagtgatgcaattgtagctcactggagcctcaaactcctgagctcatgagatcctcctgcctcagcctcccatgtagctaggacaacaggcatgcaacaccatgctcagctaattttattttttattttcatacagacatagtcttgctatgttgcccagctggtctagaaccactggtctcaagtgaccctccctccttcacctcccaatgtgctaggattacaggcatgaggcaccactcctggctttatctacaattttatactttttactctgtactctgctactcatagcttgtttatccatctctgtcttctcagagctttggacagtccttgacccataatatgcatttcagtatatgtacagatgagccctccatatccctgggttctgcatctagagatccaaccttctacatctagaaaatgctcaggaaaaaataatttcacatgagaaatagaactaccattccatccagcaatcccattactggctgtatactcaaagcaaaataaattgttccaccaaaaagacacataaacccgtatcttcatcatagcactattcacaatagcaaagatatggcaacaacctaggtgcccataaatggtgtattggagaaagaaaatgtggtacatatacaccatagaataccagacagccataaaaaagaatgaaatcatgttctttgcagcaacatggatgcagctggaggccattatcccaagcaaattaatgaagaaacagaaaaccaaatattgcatgctcttacttataagtgggagctaaaccatgggtacacatgcacataaagttggaaacaatagacactagggatcaccaaatgagagagtgagggagcgggggaaagggtgaaaaacttcctattgggtaccatgttcactagctgggtgacagaatcaatagaaactcacaagtcagcatcacacaatatattgttgtaataaacctgcacgtgtaacacttgaatataaaataaaaatttaaatgaaaaaagaagtttcacaaagcttcataaagcaaagcaaacttgtcatgcatgaagtatcacactgaatccatatgaatgaagtgatatgtggcattatgtcaggtactataagtaatctagaggcaggaccgtatataacattgaaatgaactgaaacacagtgtcacatcttccataaagatttcttaaacctctttcccgtgtactctccatcttgtgtctccactatatctcatgcataagctgacaaagcacctcagtcacactactgtcttctctgttagtctatgcgttccttaaagaatcctgttttatgctttcatcttctgtgcctagaacagtacctagcataaagtatcatggaagacacaaaataagaaaataattacatagtgatataatttgacaaggtcatcagaatcagaaatgaggtaatgtgaagttttcaactgtctttaacaaaataaaagacttaaaaatatctcatcaatgaccacttttatgatactaacttttctatttggcacaacagtaaagaaaataaacaaaaaagggctgtaccaatactaaattcattcaaccaaattttattgatcactttttctgtacgagatgtgatttctgaattcaaagtgattacggcccaaagagtgggatgtatacataaattaccaccacacaggggtcatatgataattatcattgaaaggctagaaaagctcacaagaaataaaccagaagagtttcaatctgaacagaccatgaaaggctcacaacaaagatggcctctgagcttgacctggaaaagacaacaggagttttaaagataacagcaaaatgtggaaagcatttcagtaggaggataaaacagcatttgtaatcacataggagaaggaaataggaacttgaaaaaaaaaattgtcaccaagcagttctaaaccagagatgtccctctcttgcccaggctgaagggcagtggtaagatcttagctcagtgaatcctcaaccttcccggctcaagtaatcctcccacctcagcctcccaagtagttaggactacagttgtgggtcaccatgcccggctatttttttttttttttttgtattttttatagagatagggtctcgttacgttgcccaggctggtctcaaactcctgggctcaagtgatcctccttcctcgtcctcccaagatgctgggattataggcatgagccactgctcctggcccacacatggatattttagatcagtaggactagatagagccaacggtgtattttttgaaaaggttccactggtgatctgaggccagtcattggcagaggatgtgaaaggcaaataaaggcgaccatgttagagatgcaattaataatctgtagaggtaggagtcaactcttcttttttttactgaaaaataaaaatgaatacatttatggtgtacaacatgttttgaaatatgtatacattgtgaaattgctaaatcaagctaattaacatatgcattacctcacatactagttattttttgtggtgagaaaacatcaaatctactctcttagtaatgttcaagtatatatactacattgttataaactagagtcaccatgttacacaatagatcgcctgaacttatttgttctatctaactgaaactttttatcctttgaccaacatttccccaatcccccccactcagctcctggcaaacactattttactctctgcctctgtgacttccacttttctacattccacatgtaagtgacatcatgcagtatttgtctttctgtgcctagcttatttcacttaatatagtgtcctccagtttcaatcatgttgttacaaatgaatttccttcttttttagggctgaatagtaacccattgtatatgtatgctacattttatttatccattcatgacaggcatcgattcttaagctaagtgtttggaattttaaattgggagccatcattcctccagaaacttaaaatctagttagagaaatcggacactacttcaagacaagcattatcacactttggattaagtgctaaatgagagatatagactatgtttgctatggaaactcagagaggagctaatttagttagggaagacttgatgaaattgtactaactgagcctggaaacattaagtctgggatggcagatgcttggccacgattgagcccacaactccttcccagaccatacaagacataggtaagcatggcagagtctttccaatttaacccagacagagcatcagaatccttctcaacatagtccactccaattgggtagagttggccttcaaggtaaaattctttggcatccctgatataaaaaagcagagaggaaagttaaatgcatttcaagcaggagtaagaaatgtaagccaaagcggagccagccaagttcatagcatgttttcagcttggaaagcagaaatcacataggatagaaataagagaaaactttagattgctaagggctgtaacaattgcctcatttttatactgctttcaggttactagggtctattatccaattgcctacttatgtaatgttctcgtatgtgtacttgtttcattccttatttcctaggctataattgaagctgtatgtaaagaaaaaaaaatgcactgccctctttagccttcagcctatgatttctgcattctatcttttcctacatggtgccatttctcaatgcggtgtctccagaaatctcctccctctcttgaagccccacccccaccccatcaaaaactctggccaaaagtaagggtaaattcacactaaaatgtaaatgactgatatgactcaaaccattagtattccctgtttcaagggtactgagcttttttaattttatttgtgcaaatttatggagtacatgtacaattttgttacatgtatagattatatcatagtcaaggcaggaattttagggtatccaccaccaaagtaacatacatagtacccattaaccaatttcttatcatcctcaccaccactgtccccccgcaacttcctcacccttcccagtccccattatctattgttctactcttatgttcatgtaagcacattttttagcagccacttataagtgagaatatatgatatttgtctttctgtgcctggcttgtttcacttaagataatgacctcaagttccatctatgttgctgcagaagatattattttattcttttttatggctgagtagtattccattgtgtatctatacatgccatattttttaatccattttatccattgatggacatttaggttaattccatacctaggctattgtgaatagtgctgagataaacatattagtggaggtatcttttgatatattgatttattttcctttgagtagatactcagcagtgggattgctggatcaaatggtagttctatttttagatctttgagaaatctccctactgttctccatggaggctgtactaatttacattcccaccaacaatgtgtaagcgttcccttttttccacatcctcatgaacatgttacatcttgcctttttaataataaccatcctaactagggtaagatgatacctcattgtggatttgatttgcatttatctgatgattagtgatgttgggcactgtttcttatacctgttggccatttgcatgtcttcttttgaaaaatgtctattcatatcctttgaagggcactggccttttaatagaaagacagaggccttaaactaagcagactatcacaaccatggcactattacattttgaaccagataagtcttgattgtgtgggctgtcctatacattgtaggatgtttagcagcatctctgaccctcttacccattagatgccagtagcatcccccagtcctgacaaccaaaaaagtctccagacattactacatgtccccttggcaacaaaatcactcctaattgagaacaaccaagttaatgtaatacgtctcataatatacaatttgttatatttggatactcctgaaatctctttatcaggcaactaacaaagctgacccagactctataaatcaacccttgctggttgtcaaactagcaacatccaatgaagctttaaaaactcaatgattttttttttttgaaagggtttcttggcatcaattcaaatagaaaccaacgtaaattgacattcgtactgacattccatgcattatcattggcttaacgtttgggaagacaagttttgcaaaacattgtggtaaaagatgctttgtataaataaagacaaatagagggtttcaggcaaaacacaaagactttgtcagtatttcccatgagccataaatagtctgacattctagtctgacaatggagagcctaatatcaaatatatttcaacatgtgtttgaaaggatttcctatgcttttaaacatcaggcaatatatttgctacttttcaagaagtgcaaatataaatactaaaacactattttttttacttcctagcattccctttttatatttttaagggcttgacacacatttccaatggttaattaacagaataagacatatgtcagaatgaaataacaatttcatttgtaacactagaatttcatgttgatgaataccaaattttcatttgatcagaattatctaagaagtaacagccctgatatgtctaaaatagttttagattcttaactatacttaacaacatcttagtttttaccttctatattcttggtattaaaatagaaatattcatccaccctgaatgaacatatgcaagtcatttttataagttagtttatactataagtataccataacatctctggacaagtgcttccactcttaagctaaggattcgggatttagaattggcagccatctttcctctaaaacttaaaatctagttagagaaattgaacgctgcacaaaaaacattaatacactttggggtaagtaccaaatgagaggtatagactatgtatgctaagggaattctaagtattatggggtaaatattatgattatattgctagaaaacttgactaccttattgagagagtattattattccaaagtggttgaaagcattgactttagggccagagggcctgggtttttaccctagtttcacccttattggctgtgtggtttgacacatcttgcttatactctctaggcatccattgtcttatcagcataatgagtaaaatactagaacctccatgagaaggttgataagagaagatatgagtattaaattgattgatctatgcaatgtgcttagaacaatagctggcaaacagtaagtgctacgtaagtgtttgctactgttattcattaaaaatcaaacagtgcaatgtgtctgtctgagaggcagactagtagaatagttaggaatctgacctgggtcaaaacatcaggtgcttcacctcttatcaacttttggcaagtcatatgacttttctgagcttcagcttcctcacctctgcaatggagataataactgtatctaattcttggggttatttgagaaataaaagtaataatgcacatcgagtgcatggcaacatgcctgttgcggtactcaataaatgtttctttttaatgtttacatgtacattagaaacagaagggaaaaaggaggagaaagaattcgtctctacagtcatttcaacaaattcttacttagtgtctcctgtgtgccaggcagtcggcgatatgaaggtgaacaaagctgagtatggtggctcacacctgcaatctgagcactttgggaggccaaggagggaggatcacttgagcccagaagttcaagaccagcctgggcaacatagtgagacctgtctctataaaaaacttaaaccttaacctggcatggtggtgtacacctgtagtcccagctgcttgggggatggaaatgggaggatcacttgagtgcagaaggttgaggctgaagtgagccacggtcatgccactgcactccagcctggacaacaaagcgagactctgcctcaaaaaacaaacaaacaacaacaaaggtgaacaagacatgatttatgttataagaaaggcgggctctgaaaagagttcccaaattctctaaaatttgacaaaggtagtagttgtcgcagtgttttctgttcatttatagagagttttatcaatagcatctaatctgcttgtggttctccttttgatttctagtgcttctattcactcatctgtttattcctgtaactggtatttattgaacatctgttctgggtcagaggtggtgctagaccagggtacacatacaagagtgagtaagagaaacatatttctgaaacaaaggaaaattaaaatccaaaacaatatgtgattaaataaatccatgtaagcatattaagggactactggaagaaaaggaggatattctcagtaggaataagagtttagttagtcaccaattaatagtaatgtgttaagtgaagagaagatgcagcaaacactgtttctatctttgctaactttaaaaatggaacagtaattgctgagataggttatgaaagtatggcaattctagaatgaggttacctaagacagcattcagtcacgactctgcaagtgtgtagttttggtgtcagaatggtttatttctggttctaggataagaaagtcagactaaaagatagggtgcttgagttctaattctgattctttacaaccttagacaatctcagagcccctgtgtgtatctttgtttttgcattctttatatgggaaccatgacacttggactttctacttcacaggactattttaaagcctcaaggcagatgatatataccactgtcttaaaaacatcatataaatgaaagggactgagacattttaaggtcataatacagggtttgcaaaaagaatgcaaaggtatcacttgaaaataaaataattttaaaaaattcaactcaaatccatgtgctggttgttcatgatctaaattatatttaaattagtgcatgttctatgtgctgtgttgcagtgaggccagcattgtagaaaaaggcaccttccacgctagatagagtttgcattttctttaatgtacaggaaggcagctgtagcttcctactgcaaatgcaaggctaacttttgtggtgtccggcaatattagaaatcttcttttcttctcttccctgaatgttgagtgatctgggatgaaaaactaacaagcgcctgtcaaatctgaagcctcagcttttctgacagaaggtccactggactttcttatcaagagagcctttacaaggaagctggaactctctctctcccagaaaggaaacagagctcatcagaatctctggacccttgacttagagggcatgctgtctccaatgaagttcttttttattcagatttgacttcacattatggctaatcaatacctcacaactgtccatgccccagtcagatgcacgtctctccatcaggcagggaggcttcctaattgagaaaaagtcagagacccaggtaccaagccctcaggccatagtccggcacccactctcttttcatagcattctagagatggtggaaataaaatttagagacatgacaggcacagccaaggaggatcaattcctgtcacttgccaccagtgtttactgcttccccaggtcttcagagggtgtttttctttcatagcttagaggaacttaaccttttaaaaatgggaagatggtgtcctcatgaattttaaattatttttatctccagtgactagaattgttgattagattaaaatgattttttgttttctccccctaccccaataccaaattttgttcagtcacacatggctgcaggaaaatgtaaatgatagtactcatatttgtggctacagattgaaggagacctattagtaagtacttgtgtaataatgtgcctaaagaaaatagcacattttcataacttcagtattgaagaggaagtagacaaattttattctcaaatttgtgactgatgttatccaatctatttacttatctagaaatgattaaatgaggtccaatatcttggtgaaacataaagcacctggctattatttctagttatttgataatatgcaaatgctgtataataagagatctgcagaagtaagattatttttaacttttcatttaattatttgagtatctttcaagcatgacttaatttctctgtatttagaccagaagagaaaatataattttgaaagtatttttgagacagttacataaaaatttctgcatcatcaataagtctatgattttattgcatttttatgactagtaaacaaaacttgttcaaaatactaatattccttgtggtttatgatagccttacaaatagataaaaatcttctctcgtcaaccccaggaatactacaaccaaagagtaaaaacattagctggttagccaatcaatatgtgttataattttgattagactgatttagttgtttcccatcccctttgctgtatatttacatgcatatgaagttgcctacattgttggatattgagtaaataaaagtggcaacattttctagctgacaaaaatgttttacaaagcaactttccagaaggtaatatgtaagaagaaatttagatgaggtctctattctttgctattaccctaaaaagaaatttttacccacacaaagaaactcacatttaaaagacagaatttgggacttcatgaaattaaccagcatgtttaaggaattaaatatctagattttcaggttaagtttttaagcagagttattattcctcccaagatttttagctatgaaatctttctaagccatactacacattcctgctttagttagaccagtgtgctgaatggaatctatttttctttgatgaatcatgaaagaattcaaagtcctttgggcctcaggatcattatttttaacatcagttctccctgaacagaaatatggggataaagatctaaaaaatttagtagcatggatatcagtcctcaggacatatcccataagctgctctttaaaaaaaaataataataataataaataaacccctattgcccatttaatttatttccacttgcctctttctcctaggttgattgcaaaaaagtcaattgagtgaagtttctggttaactacccactcatcaatctagacttttcctatgctatgtgtctacattttaaccagcatttgtatgagctgagcaatttttataagttgaaaaatacatacagccaaactaacttcaaagaaacctgactgtatgttgagcaaaacaccttctggggaatctcactggcatgagatagctgaccttgtgtgccctgttccaatgattcatagaagatacccatacttaatagaagctcttcttgaagtcttggaataggtcatctacctcctctgggtttagaaaatatctatgtattctaactcaagtacctatcattattctcttacagaagcttctatgtgttctttaattttttgaattgttgccttgctgaaaagagtaacacaaagaggccttttgtaatgaggtgttatctcaatatggtaaccttccctcccccccagtgtgattttgatgttcggtctcctacttagttctagaattcggaagattgcattgtattttgaggcttttgttatacctgtctatcttttcaataagattccattaattatattccattctttccactttgatatctcattaaaatcttataaatgatcatgcagtgaccttgaaggctatgcataatacatgaaagtaaacctgcagtaaaatgtattctttcactcctgactggctacatcccacgcttcttttcctctcccaagtgactccaattgggagagctttgctaactgagccaaggtatgcagggatgcgcacatctcccagctccagtatctttcttagtcatgacagctgcaatatgttaatggcttctgtttggatgtgatggcctggttactacttagggcactatgctaattaacataggatggtgacaacaggtgcaaatgtcattttacatcagcatcatgcacatgcaaagatagctagcagcccagaagcaagccaagaaaatgttaacttgagtcagcagccttgcaatctctgaacagatcatctttaatgcctatgattaaaggattcacggggctgctgatgcttttttttcccctgcaagaatgatatttctgaatatatgggatgtcttcataagctttttaaagttatgtttcaacaaaatgcacttctatggcagataagtaaaatgcacaaggtgtgtatttatgaaggtttccttattgaataaaagttctgctgagccacatttattgcactgagcatcatctgaaatggacatggttttgcacaaagtgaaatcctatcagttggcactgggtgattttcccagcagatttactgcattttactttatgtatttgtatgtttatttggagatttggttttttgagtcatattcttcttacattttaatgaaattgaataaaagtggaaacatagaaattcctcttaagacattactgcatatattcaacttaacaatgaaataggttctttacccaagtaaagggaaaattcacatactaacatcttaaataagtaacaaataatcttattctctaaaacataatttattatcatttataccaaatgatctagcttatgtttaataaagatcactgatatactttacaaattgtcccaaagagatttgttcatttacttctctttaacaattcaaattctgagatttatatttattgtacaatccaagaacattggagattaacaaagacaggtgagaaaatcttggtaataacacaaatacatcctatgggttgaattggctaccctcgttccccactcactagctgtgaaaccttgaccacatcactttctctctgagcttcattcaggttccttatttgtaaaacaggaatgctggaattacctcaggtattacagaatcgcaattgggatgctgaattaaattcaatttagaagatttgcattttgtttgtatctctgcaatagcagtactaagtataccatgattatgtttacatgtcattaacaggtaaactttggagctactccaagcctaagactatgtcagatttacctttttatttccacctggcacaatgcttgagcataatgggtgttcaaaagtacactaaatggatttgtaaataactatatcagtggttctcaagcctttatgcctgggaaccaaaaaagcttttacttacattgatatttatagtactgaaaattaaaactgagaattttttaaatactaatttattgagtaattaaaatgacttaataaataaacttactatacagtaacatactaacatatttttattaacacttatattttccaaagcaaaaaaatttgtaagaaaagaagcagttttaaattttgtaaatttctttagcatctatcttaatagaagacagcaagattttaatgtctgcatctgcagacatgtggtgtggggacttcaaagacctcctaaaatcgtcacagggatctcagagttccccaaccacactttgagaaccacaatgagtctctaaaaaggcagaatccagaaaatccagtatgttggcaacttatgtaactgcaatccaagtgcattttgaagagcacaaagggataaacaaaaatcatgtggtatgaatcattagccgtatcgtagaacagagagcatcaattcccagtagtttcatggttccagaactttattattaaacatttttaattaatatcttcaggagtattacatagaacttaagaatctgaatttttgcattaggtgcagctatggtcaaatcctgtgtctgtgactgtgtgacttggataagcaactttacctctctcagctttgttttcctctttggaataatataagtaataatttctgcctctgagtgttactgtgaaaactaaatatgatcctgcaaatatttaacacagtgtctgggacagagtaaacttcaatgaatgttagtgactagcagagagaggaaaagaagatgggatcttcctataaaggaagctcattctcttatagcccttttaacacattacaactctgttaagccgtgactattgttttaaagaaatttagtcaaaacacacaaagaaaatataaataaaaagcaaggaatgccatttttcacttatgtggtttaaaactttaaagcgaattctgttcataaccaccagccaaacttctcgtaactattcttcctagttcattttttgcacctcatatgcttgcaaacctggattattccagccaccactccccaccaattctactgtccatccagcctctgactccctcccccaccacttctggtccaccaacttttttcttcatctgagacctctccctcaacctccagcctcttagatctattgttttcctgcctgtgctcggttttggcattccaaactccaggaaccactgtggccaagacagatatccacggaagggaaaaacaaggaagagtaggaggaaggcagacaagcaggaatgaaattggattgaatgagaaaagaactataattctctgaacattcctgtattcggtaattttatgatttcccaacatccagatatttattgcacacctcctatatgtccattgccatgttagatgctggaacaaaacagacactgtctcattactcaagaaactgagtgtaggaggaggtaagctgaaaacctgcgaccacaatgagccctcaccaaaattcatgtaaatgcttttttgagttttatttttgatattaaacagagaatagcagaggaaacagacagaaggtaaagagagcagacaggcaaatgcctttcaacgacactcagtagaaagcttatatgtatttagcccaaaacacagagtaaactatccccacacactcctttaaatgaggcaggatagtttctaatatattttttacattctgtcaatcctgtctccctgtgagttccctttcattaaatcaatggcatttctcactttcaagatgagtcacagtctaaaacaaagcagttcttgcccggttttaagtctccaattagacttttttctaagattatagccttaaaagtcagatttgttgaaaaagaaatggattttctaagttctaatagcttgagagcaatacaaatccaaaacaaacctgggagattagagcacagggtagtgtagagaggtagagagatataacttcagaccaactttcccacaacagtaaaaggaaatagaagtttagtcaaatagaaaagtaaagatgactggagggggcaaaacagccttagattctgccaggatcctcaagaagagactctgtcctgatgccacacagcacccctccctctttcctctgctgacatctgccctcacttcccaaagacgtctgttcctctaggccttcgtttcctcatcatgaagttcagaagaaaagactgacctaattggtagggttgttgttgtgaggactgcattcgataagtgcttaaaacaatgcctgatatgggaatcacttaacaaaaattggctgtcattataaacagtattatgattattgttgtttttatccacatttagttgtgtgtaatcagctccagtgaccacactgagaagagaatcagagacactgtgggaggaaaaaatcataaggtgttggaaagggaaattagcatgttagaagatacctttttttaaattttattcaactgaatattaattgaacacctattagtgcaggtccctgaccaggatgtaaacataaccacaaaggaccagctgaatcctaaccaaacccacctgccctgaaggaaacgaacgctcccgcagactacagatagcaaatgctgctctcttccttcctgcagcagcatttaccactggtcggatgaccagtaagaaccaacagagattgtcaggaagcctcatccttcccttccctccacactggggctcactcactccaccctccgttggtcccctgtcaccaagaaagcaaggcagcagtagaaagaagggtctgttttatgaaagttgtgttgctatggaggtagattatagacaataatgactcatgtcaggcattgcaggattttgaagaaagaaataaaataagttttaaggctttttgtagaatatggagtttcctttataggcaaggagaatttgacacagaagttaccccccaaatttgttctaaaagtttcactattttgaagtgcacatttaaaaacacaaaactgaatgaggacctcacacgtctttactgactcctcacttgcacaattcttttttttttgtatttttatttttttttattttattattattatactttaagttttagggtatatgtgcacaatgtgcaggttagttacatatatatacatgacttgcacaattcttgagcctatgtgctctagagttgtagtaactcgtattaccattccaatcctaactggcttccataattccacccaatccatttctcacttgactatcatataaataatgtacagaggactgcagaagcctcatgtctacctacggatacatgggaatcacttggaatacaggagctattgctgagaattgttttctcactgcagcttatttctttatcttatgcttctgttttccactcctaactatttattcctcttagaattcttttttcgtccattaaatatgtatattatataccagaaagttattactgtgcttttctgttgcacttctctagccatggatctgtcttttcatcattagcattaggcactctcaggttcaaaatatttggtgaaaagaatttattggctttttctcatcatgacttatgaggtgaaattaaaagttcatgtttatttcacatataagtaacttttcccatgatccagtacatgtaggattacaggatgagaggccagacataagttacttttgttttgcaatttttttttctttcgagacagagttttgcttttgttgtccaggctggagtgcaacggctctatctcggctcaccgcaacctctgccacctgggttcaagtgattctcctgcctcagcctcccgagtagctgggattacagacatgtgccaccatgcccagctaattttttttgtatttttagtagacagggtttctccacgttggtcaggctggtctcgaactccctacctcaggtgatccacccacctcggcctcccaaactgctgggattacaggctcctggctcattttgcatcttatcacacatggctgaacaccacatacatgcaacagccactttgtaagtgggcactagctaggagagaaaagaaaggggatgagaaaggaaaagaagagtgaaaatggaatgggagcagccgcccctgcatccgcatatactggcaacctgcctgttggccaagctcaaattatgtgttttccaagggcactctgtgcaatgaatcccctagtctgtcaatttattaatgagatcttttaaaaaataaacttttgtatatactttttttaagctacaacattttaaaatagagactgttgacctaaaaataattaacctgtggaatttctccctggaaaattatcaaatgccactggattttggaaatgagtagctcaacatcttatcccaaatggactctgaaatatgagatgatactttctgactgtttagatttgaacattttgtctcaagtaatttgttgacagttctcgttactagtgctacataataaattatagtcattcctctatatccgtgggtgactggttccaggaacccctgcagataccaaaaatctgcagacattcaagtctgctatataaaatggtgcggtttttgcctataacctacacacaccctcctgtatacttggcattatctctatctctatagctaatacaatgtaaatgttgtataaatagttgttatactgtaattttgtaattttttttttgaatgtttgatctgcagtttattgaaaccagggatgtggcccatagatacagagggaggggcaactgtaacccaaaacttagcagcaagcatacacattatattgagctattaggttctgtgagtcagtaattcaggcatggcttcctgggaatggcttgtctctgctctgtaatgtcagggttcccagctagaagactcaaaggctgggggtgaatcaataactgggggctgaagtcatctggaggcatcttcgccacatgcctggtggtggatgctggctgccacctggcacctcagcctgttggcaggagcacctacaagtggcctctacctgtccctgggcttcctcattgcatggaagcttaggatgattagacttctacatggcgggtcagggtttcgggagttgagtgtcctggccaacaaagcaacgccgcaatgtctcttctaactcagcctcagaaatcacacgcgttacttccactgcattctcccatcgataagcaactcacaagtggcccaggttcacagaggagagaatttgacattctttcctgaaaggactgtggcaaggttctagaatagcatgtaggatacgaagttgcattgcagccctctttggaaaattcaatctgccacctcaattcaagaaaatcactgatgagaaataatggggaaaacatcatttgactcactcattactcagtatataccaattccagttgattgattcagtttttcacttgttaatcagttgttttgtatttggaaggtccaataaaatctccctttcccccttgtattctttttcatttaaaaaaatagtgttgagaaaagataaacaatgtataagaaagcagaaattcctaaatgatacttcagaatagcttaactaagaaaattattttgtgaaaatgcaaattgaaaaatacattttaggattttgtgcttgtgtcatgaaaggcaagattcagacttcagactctgtgagctgggaggttttaaaagattctagaacaattagagagactggaagtcacttcttaagccatggctagaagatttctggcaagaagaaattaatacattcctcaaaatatggatatgtgtgtgagcatagctataagacatatgcactagaatactgcactggtaaaatggtaaatagatttcctaaagtattaaaatattatgtgtcctctgagaggaagcttggctctgtgtaattactaatctttgctaatttttgtaatcctttgcatttcagatattatttggcaatataaccctgaatgtttaagctctcacgtttgtttttcataactatataacctttccagtgacactttaagaggaaatggaaagttgcaccgtacatctcaaacccataacatattagtaaatacttcagagccaaaagttagcttataccatatcctagtaaaatgtcgccttttaaaccattctgcaagtccaagtcctttaaaaaaatctattatcttcacaaagggatatttagctagtggaattataactccttggcttggctcatgaattgtgcttgctaaatgaagcttcctcagaaatccatgtggcctttacagggcttttaactccaaaaaggcaaaccctggctgggcccactaatagcgagcacatattattttcacgcacttccatttgcgtgtgcaaatacccatatttgctcatggaaattgcccaggcaagcagctgataatttggaaaaaggacagccctattcagcatgcaccaatgcatgaagaaacacacgctttcagtgcatgaagattgcccaatctgtgggtagttcaaggagaaaaaaaaaaatgaatgttcttgtatgcttggcaggtgaattgacaaataaggaggatgcacttaaaggaggctgctaaaaagttagcattatttcacagtaattttattctagctttgcttatataattcacagtcgtttttcagcttggggaaaaaaactaggctgaagacaagaattaactactctatttcctcctctttaatttccagtgtcggttttcacggttatttttgttctctgtttctgccttctgtgaatacatgtatgtgaataactctcctttttgctcagttgaaatatatttggcagtgtgaaaaccagcttctctcgcttctgctactttaattacctttgttaattctgctggctcttttccgcccccacacttcaccatccgtccacttccttatcaaactggtgacctatttttctttccgtaacactcattattctatctcttaaaaagtgggctgaatggaaatgggatggggaactaaaatattgatgcatggcagcgttattgtgtgctgcttctgggtggcccagtttcttcaggagtcacactggtagcaagtagagtctatttgtaataatagcacaaatatcactctttttcccctccaataattaagacctctgtaaagcccctcacctccatgtatttcaggtgcctccaattggctcatacatgggtgtggttccccagcatgctatacctgctgacttcagcaccacacattgcatctctacaacatgccattgcccctccagaacatacatctctagttgccagacactgggtctgctggatatggcactaactttgggcactaatgtccttacacacactgtaacttactactactgctaatacatctgagcccatgaagaaccagtgtcattggctgttgacctaaaatggataagaatggctctctctctcctcatgtattacattatgttaaacggctgcaaccaaaacattatactgtgtctccattcttcactttgtcaaacatgtctttttattttaacttacagatcctgttcaagagtcactgtaagactcaggcatgagtccagttggtacagggggaagaattcccctgggtaatagacactgccacctgagaaaggcccagagactctctttccttcaggagtcctaggtgttgttattggatcaagcttcttacgcatggcaactcctttgcataggatgagttatctattagtaagatccctagtccctcccaaaaagagatttttgggggaccaccccttccagtccagctgacaggctcacacatctttgaacctcagcaatcaacacaacttgagctatagccaggacccctatcacactttgtattcatttctattggttcttctgtctgaagtgatcatttagctcattgtttctcagaggaacaatattagcattaaagttttcatgagagttttgtcatttcatatgtcattaagaattacttttttggctgaaaagaaaagaaaagggaaaaggaataaaagagaggcagagggagatagataacttgcagagtcagcattaggagtaatctcccagccacccactgtgaggggatttactcactgtaccttcagattcacaagtcacttcagagagagagaggcaagaagataactcctgtaaatgtcagtctcttagattaccctgttgttaaaagggttattttacacgctgaatatttttttaatctgattaagataaaattaagattgagattaagataagactaagtgggtatccacttgtttaaaacaaaatggtaataagggaagaaaagatttaaaaggttagaagaggggagaagaagggtggaagagagagagatttttcttttttaatttttctttctttttttaattatttatttatttatttatttatttttattttattatttttttttttgagacagagtctccctctgtcgcccaggctggagtgcagtggtgcaatctcaggtcattgcaacctctgcctccaggtttacaggcctgtaccaccacaccctgctaatttttgtatttttagtatagacagagtttccccatgttgcccaggcttgttttggggtttttgggttttgttttgttttgttttgttttgttttgttttgttttgttttgttgctgtgacagagtctcgctctgtcgcccaggctggtgtgcggtggtgtgatgttggctcgctacaacctctgcctcttgggttcaagagattctcatgcctcagcctcccaagtagctggtataacaggcatgtgccaccatgcccggctaacttttgtatttttagtagagatggggtttcaccatgttgaccaggctggtctggccctcaggttaccacaagtgatcagcctgcctcggcctcccaaagtgctgggattatgggcgtgagccaccacgcccgacctgaggctggtcttgaaatgctggactcaagtgatctcccaccttggcctccaaagtgttgggattacaggcatgagctaccacgccccaaccttgaggtatttctttgataaggtatttatccaaaaaagtttgaataggtacatcaaacgtattagtttaaaaaggtcatagttttggtcagggtacaaaaactgtaccataaatagggcaaccattaggctggccaaattatctcagcttataagggaaaatgaaaacaaaagataaagaaatatataatgacttatctctgaaactaatgtaagctgtcattatgcaaatttttagtttcttcatggaggtggcccaattgtataaaaaatgcacaattttattataaaaataactataactctgatgcacaaatgttaataaaccatgtcttattggtaacaaataaagttcccttcatccaacttttcaaaattaaggcttattaaaaaaaggaggatattaaaaattacctatttaggtcatgttttatttgctgttcttaatttaaagaatactttcatttagcaataatagtctattttaaaagtattacatggatatatcaaccattccaaatttctactaatggaaaccacagttattttgactgagtataatttgttctaactttgatgaagagtgtgtgtatgtgtgttttaataaagtctgtatcatagctctaatattaaaactaggactaaaacaagacacacatgattaataaatatccttgggcaactggaaagcttatttcatatatgagaatgtgtactaagtagacattctaaaagttgctcatagaaggactctatcattcccaattgttgaaccattaaatccattacatgatgatacagcattttagatatttattataaattttccttatatttttccttatatattttatatatatatataaatatatatttatatatatttccttatatatttccttaacatacagcataactttgggcaatcatgtaaatgtgggtgtttcacttctgataagaaaatgtaaaatatgaaatgtgtttaaccatgctggatcattttcatgtattgaaaagaataaacagtgaacttctgtttccaaattgctcactatttaaaactcagtgtaactcttcatttatcagatttatcttgctcattctttgttaattaagaaatgcttaaaaaaatcaatctctggtcaaattcattttgcagttaataggtgcccatatagcagcttactgtctaattactccatgtatgtgttacccggcctatgttccattagtaaacatttaaaatttaaacagggtaatttgttcatattacaataaaatctttacttcttttcacctgaagcatattcagcatgggtcagaggttaatgaaagtctagatgaacatcaatagtgaggttaacttcagttaagctgtagaatctgaggtccaggatcatgtaccctttggtagcttatttttcctacctgcgtagtggggttatagaaaaattataattttaattgattataaaattgaccatggtaaggacctgtctcattttcagcttcccctctaaaaacctaaaacactctaaatttgctatactttaaccaggtaacctccccggcattcactaaagttgccaatggtctgtcttcctaaatacctggcactaagatatagtagatgctatattaatattgaatgaataaatgaatggaaatgtcctgtttaaaaggccaaacaattccttcctaaaatccagtccaaattcatttaatccaatcctgtttgtttctcctgaatgatttttggtacctgagtgatgtgttaatattgatgctgaaaataagatgttattgctatctttattactttctgacagctttctcaaacatttgctccaatgttttcttctcctcgttatgtttttccagcagcccactttcttgggtcttggactgtccatcctctcagtaccatacttaacccaaagacaaatcactgtcccatttcctctcatatgttaaaaaaaaaaaaaaatctgctcgaaaagaacacactctgcgtttttatttatcctcatagtttcacacatgtagcaattttatgtccaaaatacaagttattagaaattctctttgaagagagaaacattaaaaatgtgattaaatcattttattaatccactttacactggggttcttttctaaaatcagacagatcacatgaaaaattttaaattataaaatatcatatttcatccactttattcatctataagtggcactgatcaaaataattaatatactttatttttaatgttttataaggtaggcttgattatctctctttcaaactgaatgtgcaaatgtcacccttttattttttttttcaagaaaattgcagccatcattatcaacccaaaagaaagatcttggttctaactagtaagggtttctttgctgcccataactttgcttgcccgatagttacccaaaactctgattaatctgagttttatctagttttacatctaggtaatatttatctagagccaaggggtcacacctagtttgccagtctctgaaaagaatcattcccaacacatctgtttcagcatcatttatgctaaattattgaaagaaagattaaaaagaattaacgattttgcttccacaagtcctaggaaccttctcctcctcccaccccagaaaatgcacactcagacatgtaccccagacctggcctgaaagccctggggtttcacacaccctctgaagttcatcctccaaacatagatttttttaaatcccagctttagtcagagggtaacaaaccccaagacagtggtgcaaaacttgtgatggggaactatgtcaagctgtatggagatttttagaaacttctgttgtttgactgaatggactcattctttcaacaaaaactttttaagccattactatggactagatagattcagggatatagcagtgaacaaaatcatcaacgggtctcacagaatttacattgtagataaaaaagattaagacatctaaaagaaaggtccaaaaaaaatttaagaaaaccatagtaagaagctcagatgctatggtgggcaaagaaacagatgaagcgatttgatcaggcagaattatggtgcctttccatggagagggagctaaggttaaaacgtctctgaggagcacagccacaaacagcagcactaaaatgttcatgtaggcttagcagttggcttcttcagcagagaaatggagggatattaaaggaatgctgtctttacccaagtttcttctccagggactgaaaaatgccaactttaccctcagtcctcaggctttaaatcccatctctaaaatcttcatgttaaatgaagggcggggcagggtagggtggggacattttttccatggcaatgtaaattctcttttaaataaaagtttgtcagtatttatcgaaagccttaaaattcttagaattcattgacactcatgtttgtgcaaaaagccatatgtgcaagagtatttgtttttgctgtgtttatctcaacaaaagaaatagccaaactccatcaacagcccactaattatatcaactttcatatatttgtactttgtttactgtgtgtccataaaaacaacatgagttagatctatgtgtcctaaactgaaagaagctccaaaatacattttttttaatttccaaaataaaggtacagaattttatatatatatatatatatatatatatatatatatatatatatatatatccatttgtgtaaaaagaaaaggatatactccatatatatatctgtgtagaatatttccagagagaaataaaaaagctatacaagactggttgcctatggggagaagtaggtggctcaggtggaaggggaatttatttttcattatatgctatttggaaatttacaatggacatacattccttttttaataaaaataagctggatccaaaagtgactagagtttttttaatgcatgtctttgacttggatattctaagaagctttcaaaaaattgttgatgagaaacatatgtattgtaaggattccctattaatttaatatagcaaaaatgtgtaacagtaagagactgtaaataaatgatagtttattcataaagtgataaaatgacggtttattcataaagtggaatgctttccagacacaaagaaaaatgttatggaaatacatttactgacatgaaacattttaattaaatattgtttaaattgaaaaagcaggtaatacgtgtaatgtgtgtgtatatatatatgtgtgtacatgtgtgagtatatgtgcatgtgtgtggggttaatggtggagagactttgaaaacattttattctcttgtgaattattatctgtgttttctctgtgttttgcagcaaggcattttctttgtttcttttttttttcttttttttttgagatggagtctcactctgtagctaggctggagtgcagtggcacaatctctgctcactgcaacctctgcctcccaggttcaagcgattctcctgcctcagcctcccgagtagctgggacgacaggtgcacaccaccacgcccagctaatttttgtatttttagtagagacagggtttcaccatgttgaccaggatggtctcaatctcttgaccttgtgatccacccgcattggcctccctaagtgctgggattacaggcgtgagccaccgcacccagcccagcaaagcattttcactttcacatttgatttatgaaaaaggacgcagggtggggaacatcacacaccggggccttttgtggggtgggggaatgggggagggatagcattaggagaaatacctaatgtaaatgacgagttaatgggtgcagcaaaccaacacagcacatgtatacatatgtaacaaacctgcacgttgtgcacatctaccctagaacttaaagtataataataaaaaaagaaggtaaaaaggagaagcacagtataaatacatcttgcattagaaaaattgcatacataaacatatttgcatagtttggttctggaatcaacaaataatctttggatggcaaagttcaggataccaaggaaaagaattaaagatagagaaggcatgaccaagcattacttaatgacatgcagcatagcccaaggtggggatctatagcaaatgatcttaggccacagggccagtgtgtggtcactggcaactctggtaggagtaagagagaattagatacagggatcaccaagaaaaagagagctctagaagggttctgaaagtgctcaataagttttgccttggctggcctcaaatatcaccaagtaagagcaacatgaaaaaaatcatgcttatgatatagtttgtctgtgtcccaactcaaatctcatcttgaatcctataattcccaggtgtcatgagagggacccggtggagggtaattgaatcatggggcgggtctttcccatactgttcttgtgatagtgaataagtctcatgagatctaatggttttataaaggggagttcccctgcacacaatctcttgcctgctgccatgtaagatgtgactttgctcctcattcgacttctgccatgattttgagtcctccccagtcatgtggaactgtgagtcaattaaaactctttcctttatcaattacctagtctcgagtatgtctttattagcagcatgggaacagactaatacagttttctttatgcttacatggaagttcaggggacctctgagttgctttacctgaaatgagatctcttcgttgagtttgttgtacaattacaacatagatggcatatttttcctgatattttctaagagcaaaatctaagctaaaaactcaatttctgacctgaaaagaatgcaaaaaaaaaaactgttttccttaaaagttatcttgtttggcagacacgtatatctaaactccagcaaatctatatgaacttgctatttggagatgcataaaacttgagtaagtctaatttgttctgtggatgttttaaccctcaatcaacctttaagagtattttatttcttttcctcttttaatctgtttaaggggtatggggagaaataagatcccttaagtatactatttaggtctttcccctctcctttctaagaagctcataaatcaaaatagaaaaaaaattcacacttcttccctctcagcaatatttattgaggactcagactgtgtacacagctcaatctcccagatattacaaagagaaatagtagaattatcccctgccacagggcgcttacagagagaaacaaaaacatgtgctccataggctgtatgcaaaggaaacttctaaaatataaaaccaattgctccccgtgtgtgagtttatatatttccaactcaaagccatagagattccacagaataggacaaatgagcctaagaaaaaattgagatcttaaattgcatttaaaatctggtttctgaaaagattctcatacaagaaatgaacagagaataaacaaaacaaaacaaaatacattcgattccaagtgctaaactgctccatatagaaattagtatcataggactgacattaatatcattgggttaggagtctttttttttccttctttcattgagatctagtatgcacatagtaaaatgctggaaatgcactaataagcatatggctgaatagagtttggcacgtgtaaccaacacccacatcatgatctaaaacattccagcactccagcaggcttcctcttgcttcttcccagtcatattgcacactccatacctaaagttcatcattggcctgtgctctgccagacacaggagactgacaaagaaaaaactctctagtgtggccattaagaagaaagagaacgtaatttcatgaaagccagcagatgagaataggagacggtaacaacatggtggcactaggagcgtgtcagagaggtatttgcacatttccctcgcccagcctgaacactgctccctccaccaccaacactggccagttcccactgtctccagagccagctcagaggtcctttgtaaaaagcctttcctattccttccagcacagggaactgcatctactatgtgctccagagttccctgcatttagctctgtcaaagtcgtgtttgcaccattttgtttgtaatcacgcatatgtctccctttgaaactgtgtgtctcttgaataatgaaatccgattgtatttgtttttgtgtaccccccacaaactcctagcagtcacatgcaaacaaatatgtacattctatatatattatgtttcatagctgaattagttgaaggaagagccagaaaaccagtgattaaaagactatgtcctagttctttttcttccaccactactagaacactttaggaagtacacacagtttttctgtttcttccttttattctcatttactacaaattaaatttgacgattttgcccactgatgtacttccagggcctagactacatcctggaactcgataagcccttaatagatattttctaaatacctgaatgagtgggtgaatgaataaaagcctccccttgcacagttattgtaaggtcatgccttcttgatctctcaattataaggggatataaatattcagctgctacatactgtattaaacgtgaaatcaaatgtgatggatgaagagttctatgtgttattgatattgaaaagaagacatgagtgtcattttacatgactgtcatcactgccgttattgtactcctccatagacctgcaaatcttgtgggtgagcaacatgctggataattttcatggagcaactcatgcatccacaaatcctttcagctttgggaaaaaatgtggactcacagaaatattcattttttcactctctgatttagtatgttttctctcttgtgcacacatattttcacactccttctcttcatctcttcacttccttctaaaggttgattgccattccccagtgcatttccgtaaatcttgtaagtacacaatatcagtcctcttctcatgataactgccagcttaatgtgtgtcttagtgggaccctgtgttcccctcccatcctgacacacccatcttgacacaccatacctagattctaatccaggcctctcagaatctcatctctattggaaaaaagtcctaatcctttccagaaagttctatgaacttcttaagttaaattaagacctgcccttttctaacacatccttagtccccagaagtctgagtcagggtgaagattcagaggtctctagcttagcctgctgatttagaagattgttcttccattctgtatggtgccagctcagtcccaaagatttacacaattgctttgtgtccatgcctactcacctccagtttctcctccaccttttgctacagtgaccccaaacttggcttctggtcaagatgacacaatagtcacacattgatgcaaaatgcagagcaataacataggcttaaaatatatttttaacgtatttttaaatatatattttaaatatatattttaatatgtatatttttaaacctatgttattactcttcattttggatatatttttatatattgtattgaatattcaataaatataaatagaatatgtgtatatatatacacatatgtgtattcaataaatataaatagaatttatattcaataaatataaatagaatatatgttgtgtgtgtatatatatatatatatatatatcaggaaaaggagaagagctggcccttgagtaggggctgtggccaagcacaggaacccagctgcagtgactgacaagaaactattgtagttcctaaggcaatgaaataggatttcacacgaacataatagatggagagaaacaatcctatggaggttgtggaggcagagatgccacatatgtcaagttaaaatcttctgacagtcataattttattgtaaaaagagaatatgccctaacatcaggaacaataacacccatgttgagcgacccagttcagtggtggaaaatgaagccatcgaagtgaattttagaacaatcccttcacatgtgctattaaatgtacttattccatctacaaggttttctatactaacagctctactgagaatgccaaattcccaattgcacctaaaattacattgaaattgctgatggctgtgaactccctagaatgttaaataaaataaaatctaatacaacgctaaattttttaaacatgtaattcccatagttagaaattctttcatattttctgttgcctctatgcagttgcaaactatgaagttcattgaaaagctgattactgtcagagttgaaatttggtccctgtataaataaatcagttcaagatattttcacaaactaaaaaattaacaaatatgccaatttgttatcaatttgttataccttatcccttggtgagactttaagttacagcagtaactgtacagtaaatgctgagaattaagtttaaatgtgtaagtaccacatataaacacagactacctactgacatgtttgtagtgccttttaaaaaaaaacttgttctgaatttattatacttatggctagcattgctcggattatacaaatatttcagcataaacgtgctttaacttagttaagacattgatttttatgacaaatacataagaattgatcttctgtaagtgtcatttgatgaaaacaaaaaggaatggtcaggctcacaaacatagtaagaatgttattataatgtttttcaacattgttctgaatatcctcagcagcatgaatagcaaataaatgaataaataacctcagaagaaggaaatcagactgccattatttacaaatagtatgcttgtgtacatagaaaatacaaaagaatataaaaaaggtattagaattaaatatgagttaaggaaattcaaaaacttactgtaatggttaaagatggataatgggcacataaaagtttgttacacaagtctattttctatatgtttgaaaatttccagaataaaattttggagaaaaaaatgaattttgcaaagttcatgaataaagtctgttccaccatagtcaattaaatttgcgtatactagagacaccaaaaatgaaaatttaaaagatagcatttacaataagagcaaaatatatcaaatacctagaaataaacataagtgaatacaaaatatctaagcataagactataaaataatattaacagaaataaaaacaaatctaaatgcttacaggataatccatgctgatggagtaaagagttgatattgtaaagatgccagttctcccaaatttatctatagatccaatgtaatttaaatattgtgtgtgtgtgtgtaacttgacaaactgattctaaaagtaatattaaatgtatatttggatatgcaaaaggtcaagaatgatcaagataaccttaaagaggaaaaaggtaagacagcttgctctacttatattagcgattattataaagctctatctacttatgttagtgattataaagctctaacattaaaatggtgtgttgatggtacacaatagacaaatagatcaatggaagaaaatagagaacacagaaacagatacttatttatgtagacattgatttataataaaggtggaaaaagggtagccttttcaataaatggtgttaggctaactgaatattcacaaagggaaaaatgctctctacattttaccgtgggaaaaaaatctattctgagtagtttgtagatatgtacgtgaacggcaaataataataatggaaaataatgcagaatagtatctctatgaccttggaaaaggaaaatgattttaagcaggtcattaacgaaaacaatgatgaattgtgttatattaaattaagaatttctgatgatcagaaataaaagaaactatcagcagtatgaaaaggcaagctatgacatgtgttaaaataaaatattcggcctaattaagtttaaaggtgtataattgattctaaatgaacaattcgtgaatcgggcagcccccagaatcacagcagattcagagagactccagtgcggtggaagaagatttatagacaaaaaaagggaagtgggtacagacatcagaagtgaggtacagaaacaactggattggttacagctcagcgtttgccttatttgaacacagtttgaacactcagcagtgtacgagtggttgaagtacggctgctgggattggccaagactcagctgttgttacaggcacatactcctaaattaggttttcagtcttctctacctgttaagttaggttgcagtttgtccacaaagactcaaatatagaagtatgcagtccttctcaggccatatttagttcgctttagcacatggcagaagacattttcagcaattgagtcaacaaagagctcacatccaaaatgcataaagaactaacaaaaaccaagtagaaaaaacagaaaatctaatgaaaaaaggagtaggacacttaaacaggcattcataaccgatgctatccaaagaaaggataaatatatgtaaaggtgtcaacctcacaacgaggtatcacagcacagctaacagaatggttaaaactaaaaatcaactaataatatcaagtgctaacaagcatgtgaagcaataagcattctcatatactgctcataggaatgtaaattggtaaattaacttcggtaaacaattggcattatctactacagctgaagacatgcatattatttgagctagcacttctacatacttacctaacataaatgtatgccatgtgcaccaagagacatgtacaagaatgattatagtagcattattcataataaatcctgactaggaaaaatcagaatgtctattaacattagaatggataattaaattgcagtatatcaatacagttgaatactaaataacaatgaaaattaatggattatagccttcagcaacaagatagaagaatatcacaagcataaattttagtgaaagaaactggataccaaaaatatatactctatgatttcacttatacaaacttcagaaacaggtaaatctacatgatgatgtcagaatttatgatagtggttttttttgtgtggaaaagacagggtggtgattagaaagaggcctaaaaaaaagactctgggatgccagcaatgttttatttcttgacttacgtcagagttacagaggtgtttgcattgggataactaagttatatatttgtgaattataaacttttaaaaatattagaaatggaaaagaaatataaaataaaatcaggcagaaatgagaaacaagttgatataaaaataacttgctagatatcttagaatttttttaaatgttattgaagtttgttttaaacacaaaggataagatctaaacactgaaagataatactgtgaaaattatttttaattcatcatcgatagacaaaagaaaagacttcaaaaagtcatagaagatatgcaacatttgtgaaacaggcattccattttttcaattatagaaaaataatatttaaagacatatagtcaagaattttccaaagttgaaggaatacctgagtcccacaataaatgaaaatatgatacattgaagcatatgatttgaaacctgcagaatatcaaggataagaataagaccttaaaagctgctggagagaaaataccaacaaaagagcaacaattacagtagatttcccttcagcaacagtatatgtcagaatacaatggcatttctcaaatttctggaagaaaataagtcaacccaaagttttatacccagctaaatcatcatattgagcacaataaagacatctccagacatcaaagactaatgtacatttccctttaccacaatgactactctctttagatttcatttctcacttccttttccactgtttttgaaacacattgtctgccaagtaaagaattctatttccaaattcattaatatgtttgccctcttgtcatgttcctgaatcccctcccaaatagtcaccagtgccatatgaatacatagaatttgtctttctgctcctgtgtccagactgctaagtactgtgaaaaaaaataatgaaagaaggaaggaaggaaggaagggaggaggaggaaagaaagaaagagaaagagagaaatcagctaactgagctatcaaaattatacaccactaggggcttcaggctgcttagcattgcttttacttacactcagttatctccactttacattactcatgttacttattccttatttcttgttctatccacaagccgttcatttttactctttttattgtccacaaaatgcctcttacttctcagtgaaaaaaaagatgaatggccttaacttatttatttctgggaggtcaaaatcaaaatgtacgtaattgacagtgtatgtctcctctgttgttgaagaaattgaaactatttaattccttagtagattagtgcttacaatttcatatctgctctataccatcaccatcatcacataaaaataactatagcaacaatactgtacttttatttaaaaacaaaaatcttccacagatattctcactattgatagaatgggtttattatctccaatcaacagagagtgatttgcccaaaatcacaattatttgtgtgccaaactgagactagaacctatggtccttcgttcccaaaatgagttctttgttcattgctctatcctgccactgtactttgaaatgatactgttttactcaactgtgtcaggacagaataaccctccaggtagtgtgaataaagttccctataaaaaaattcttattagagaaaatatttctttactatgttaatcatttcccttaataaaaatatcagtcagaagaaaagacacaggaaaaaatctacttaacaactgtaatgcatatttgtttccccttctcaccccagtgaaatcctttctcctactcaatattgcttgttatctttgatacctacagctatgtttgctcatttgtaagaatgcaacttcaggtctactcatgaaatgaagaaaccctttgctgtcaacttcagtcataatactgtacttgacccagctagctagaatacttaatgttgatacactctaagcaaacataccatttttgttatctcctgctgtaaacaaacaggaaattaaaattcttcaggttagattctatccttggattcttgactcccactgaaatcaatgggagctgtatatgcatttataaagagaaatttaacttttttaatttagaggaaatcgcaagaactttaaaaatgactttttgaacaaaattgaaaggaataatttattcaatcaattatactttttagtacaaatgtttatatggctcataaaattgttggtctgcttctattatgataaacaactagcaaactagagttaggaataaaaaaaatgaaacactgaattatgagagacaggattatactgggagaaaaggatgtggttttgaggtcataaaggcctgattataacttccaagtaagaaattacttagccataacataatggttagccatttaatgagtatgttttatgtgacaggcataggttaaacattttaccaaatctcaataagttcatactactattagcctcattgttagttgatgaaactgaagcttagagaggttaagttgctcaaggtaacacaaaatgtggtaaagttaggattcaggcccaacttatcaggcccaatggcctgtggtcatcaccaagtttaaagactggtagcctgggtgccaaacctaatccacaacatgtttcattattttgaaacagtgtttttaaaattaaaatatttcacctaatgtctggatttctggtttctgataagttgggaacccaagcaatagcaagctgatacttgaatatgacagtggttggccacctggatagcagctgtcccttcagacaaagcatgaactcataggtccccatggctccagattgtattatacccacctgcttcattcatggatatcacttgactcctgcagtgttacagtggctgtaacactgtacactccctccaaggaaggtatgtcgtctctttgaggcttattgttactatcttattaagtagaaatattaagacccaccatgcctgctacaaggaaaaaattcaacaatgtacataagcacccagaaaatactaggcacttattaaatagtaacaattattattttattattaaatagtaattattattttattaataaaagcatgaaaactaagtaatttattttaaccaaggagtcaagttcaggcaccttgaagacactattatttatactacaactgacaattcatttaagttgaaaatgtgctggtctctgaaataaatactttctaaaagtaatccactaccaaaacaaacaaacaaaacaaaaaagacaaaaacaaagtaaataagcaaacaaaaaaaaaatcccccaaagggtgtttaaactaggagatagaagcagacattcaagcagctaattctagacaatcaaatgtgaaagtgcagaaggtatgccctactgacatatgtatttatatctaattttttctcaaaagatatgtacatgcaaggtcatctgacaaaagttaataggaaatcagagtgaagaggatttaaaagtaggaaaatctaaaagtgggtagagataagtaccatctacctctctacagaggatgacaatctttggctcagcatattctgatagccaaagctaaagaggaaacacaatccattatgtgattcacagtgctcctaagattacaaactcaccagtggctttcctgatgctgcattctgagagaaatatattatcagaatcagactttgagcaataaatggatattggagagtttgcatttatggtttctggcagaactctggattgccgtcaggagttggcaaactttccgtgaaggaccaaatagcaaatattttagccttcatgggccacacagtttcttttgcaactacttcattctgccattaagatgtgaaagcagacttggacaatatgtaaataaatgacatgagcgtgtttcaactatttaggaaaacaagcagcaggatggatgtgatagagaagctgtggttgaccagcccctggtctatgtcgtcaattcaaagcagagttgtcatttccaaaagatattttttgatggttctattagtgaaaaataaaagctatttttcagattgatgattgctttctggagctgactatccactccttacagcttggagtagagtgttaagaagtggatcaaaattccaataggcattaaatagtggtacttcttgtgttatgctggtatactggctgttacctagactgtacaggaaggagtgactgagtttgaggggttcatagctcaggtggccatctagacagggaccaggcagggtctgtgcgttgacactggaagcccccagagctcacacaactgtgatagtataatgcagcttccaaagagacctacgaggaagattatttacatgtgtcttggagttgcagaggctctctggaagtgaggctcacaattttccagaacatcttccaaagggtattgagaaaatcagagattttacataacaaggatttttgttgttgttttgttttgttttgatcattaccagtgactaaaattgtccttcatctctccagtcataccttcttctgacgagtccatagtaatttcagaatgcagtaatattaatagttcatttccatccaaaggaatcattgtctctagttttttttttttttttcaaataaaaatttaagaaacgctacatataaaaatgaccatttctatgccaggcacttagtagtaagtgagaaaacaaagtactgaatttgaatctgtacttcatagaaaagcaaattaatttcaactcaacaaaattactgaaatatgcaaagaacaaagttattaattgagtctggggaggtcagggaagctggcactgaggaggttacatttgaactcagtcttaatggaatcagacatgcaccaaatgggaaaagagtgtaggcaatgatgacgggcaggaggacactgctggcaaaagacacagcatgagcaaaggcatgtgacataagggaacatggaaggttctagaatggaaagcactatattttcacaaatgtgtgatgtgaagaaggcataagagatgaagctggagaagtaggcaagacactatcaagttaaagggaatattgaagcagattaagaccaacagtggtagccttcatcaatgagctaatgcgtctgtggaaggcacatcccagagaaataaatcacacaagtatcaagggggtctgcccttatttggggcttagaacagagaaacagagactggcttggcagcaggggtcttgtagctctcataacaccagaggcacaactctgagaaggataaagtttcctgaatcacaggaaaagatgccctgcaaagtaaaaggtgaaaatgtcaatgttctcctggcactaaagatcttagatacagcatcttcaagaagctcctcaggtggaggtcctcaggctccctgtcctcttgaaccctcaccaggttttggagagaactgcagtaatttgtactttttttctcttcttttcttttttcttacccccccgcccgcccccggaaaagagggagggctgaaaaaaaagtaaaagtctccctttgttttcttcactcccctactgggttcttgattcattaggaattggttccagttcctggagcatccctggagccagctaccctggctttcactggcagccttcacagtaacacaagcagcctgcagccccactctgtactcagcttttattcatgctaggaaggccttctcgccttcggaaaattcacactgctccctgatccaaatgagaagaactgccttttaagcaacgctaagactttcagataataatcaccctcgaacttgaaaacataacgctcctgtttcattgtgatctcttcattggtttctagacctcaaactccccagggaatgtcacaaattcacatgctatctctgaaaaatagatacagcacttgcagctctgatttacctaagaagcggtgttagaaaaaaaaagaaagaaagaaagaaagaaaaacaacatattcatgtagccagacagctccctgtcacagacacagataagaaagctcaaactgttaagttattctaggaaaaggctgaacattttatattaacttgtttccttccaggttttttctttttttcagggagcttgagaaaaaattttacctattcccttttttactaagcaatttgtcatcagataaagtagctaaaaaaatagtggtgagtacaagaaggcatcctaggcagcatggtgcaatgggaactgtcaaaggaccatgagagcagacagagctgggtttaaagcctgtcactagttagctgggtgacctgagcaagtattgcaaatgccctgaggctcaatttcttatcaccataaaaagctcacgagattgggaaggttaaattagataatgtgttgatttaactcctccaagaagcaggcattaagagagttcattcagggaaacatctgagagataaaacgggaaggaagcggagtaggctgagagatagaccacaatgcagtctggcccctgtgaaggcgagagggaaggcttgggcgagagcctcctgactggggttctaagaaagttcagcaaggccaatgggaagtacttgtcaagcttaagtcacttgtcagcgaattctccatttcccagaaacagatcagccttagcatccctgccacactcaatcatcggctgggagcagccgtgggaagcttggcctccatacaaacttggtgatggatttcagaacacaacagctggggccagacaattatgctccctgctgaaagagatttgagagacatggtctcataacagataacatatgaaaagcacttggcaccagtaattggcatatagaagtcattcaatacatgtactttctcccttagatggagttgttctggtggtgtttttgtttttgtttttttgagactgggtctctctatgttgctcaggctgatcttgaactcctgggctcaaattatcctcacacctcagcctcccaagtaagccaggattacaggtacacaccactacatccggcctgatgtcattttgttaaaagtcttcatgatttaaatcaactttgagatgtaagttgatcttcagtttatgaaatgcagtatacaaattggtgacatctcattcatatttggaaaaagaatgtttttcatcataaactttgaaggaagaagaggatgaaagtcttgcactcttccagaagacgcgagtcgtccatccccgcttgctatcaatggcagagttcccaggatagcagtggcatccctggtttacatgtctgggggtaaaatttttccatccaatttacacaagcttacatcataatctatgctttcaggcatcacactcctactcttgtgggtttcatacgttgctaaaacatttcatttcttgacatccaagaaaatcacctgctatttcaggttatcatttcctaaggggctacagcttccaactgagaagacctcaaacttcagtctcccttggatgaaagcagaagtctacagtttcaaatctatatagctttctaattatcacacaaagatctttatatgagaatgtataggtaatgcatacgtatacagacttggtttcaggtatccaggattccagcagtaggtttttactagctttttatttggaaactacctaacctctgtgaatctcagtctcttcatattacaaaattggactagtggtatcttaggttgaaaagttggcatgaggttcagagacattaaacacaaaacacctagtataatgcctaatacataacaggcacttaataaattataactaataatatcttttctagcttctgaactataggaaaatatacaggaaatgtgttctgatatgaactgcataatgttatgcaacttatcaataaagaactgcaaccagaaactccaataatagttaatgcaataatatctgtttagaaagcatatgattatgggttgaaatctagctgaaaataggaaccataaaattaaaaaattataatatatgaataaacctcataaaactaggagtagggttgttctctgtcatagattcagccccataaggcacagttatggaattgtatatgtaaaattagaaggtaaaagttaccaaatatttgctactagttgcttcatagcatcttccagatcaaagcactgctaatctttacaaaccagaagcagagatccaacattagatatttttcctagatcttgttggatattttcttcgtttatttcatactttgatttcatatgcctgagattaagtatacactccttttcaaccaaattgacttattctttccccgaggaaacagggccttctctgaaatgtatggatcctctcctgccaagaagagaaaagtcttcctatcttaatcgggtcaaggcccctccttgctaggcccagaggttgctcagcagtagccgatagagagaatgattcccgctctgcaactgtctgttaccatggagacatgctaattagtggatgatgagaaagcagaggagttcagggtctataaagccatgagaaagaaagggaaataaatggaaaaatatggacaaagagaaatgagaggatcttttggggcaaattgtaggtagagaagtcctcaaatgattggatcataatgaagaggtggaagagggttatgaaaagagaatattaatgacaaagactcatatattatgagtttgatgaaatgaagggtgaagactatagcgtaagagaagaaatggaaaactccagtttcaccaactacaaactcaaaggatcatggaatgttaaatatctgaattttaaaggtgttgaaggacagaactattcttttctaaaggaaagaaaatgtgacatttggggccatcaaaatagattgcaaatctctgcagacatttctctgcttaaacttgaattcacatttaccaacccatcataatttgctgggtgaaatgtcaatgcaccaatgcatgagattcctgtccaattctctgagccaaaagtgcccttggatttctatatccagacctccaagaaataatagcatagaaaaggaaatatagccgacaatttcaggagctatgttttaaaaagataatatagagacaaaagtgccatacctaagggcatatgagttcttacatacctaaggcattttgaaaacttgactaagtgataacatctgtcttttaaagagataattttatattacattgatataaatgttttctattttatatattgtatggtttttttaaattatactttgttttagggtacatgtgcacaacgtgcaggttagttacatatgtatacatgtgccatgttggtgtgctgcacccattaactcgtcatttaacattaggtatatctcctaatgttatccctcccccttcctcccaccccacaacaggccccggtgtgtgatgttccccttcctgtgtccatgtattctcattgttcaattcccacctgtgagtgagaatatgcggtgtttggttttttgtccttgcgatagtttgctgagaatgatggtttccagcttcatccatgtccctacaaaggacatgaactcatcactttttatggctgcatagtattccatggtgtatatgtgccacattacacactattgctgtattacacttgagctgttaacacattttgcaagagatatttatgcaaatacaaacatattgttaatgtactaataagtaagctactggtgaaggccaagatattatatcagaataaacccaggtatgaaggaagaaaactggcccatcgtgttagtttcagaggagttatggagttgtatgagtctcatgtgcaaaactcttctcatgcctgtgcagatgaatgaatgcacagcactccagaccttggaaatgtccacacacacacacacacaccttggatttcccttcttccatctacccagactgtcttctaccatatagaccttggaaatgtgccccacacacacacaccttggatttcccttcttccatctacccagactgtcttctaccatatcgattccttctcatccttcaaatctaaatcaaacaccatctccttagtagaggcctccctagaccttctcaagtagttagtggtacccttcttagtgctcctgaagtcctttgtatctacctctcttaaagagcttaattctagacattttggctatttgtttagataattgtctatccaaaattgtaaactcttcagggaaagaaattttattttacataccttaatattcttaagtgttcccagaaccaagcacaatgctgagaatacaaagatatttgttaaatatttattgaagtgtttgtagcaatttataaccagtaactaatttatacagtgatttcaattttatagcaggctttcatgccactagagtgtaagattcttaaatccccatgccctttttgctttcctctatcttcaatacattaactcaacaggtgtgccattaaaatttgttagatgagtatccagatccagaattattcaggaacactgcctgcttttcaaaactcatagttcctcagcaacatcataatgcctgaaattctctttgctctgtcagtagagatcaaactctgctaacatgtgtgtattaaagggtaagctttcctagtcggtgaattttcccctgaagatgacaaatgctggaagcgaatgttgtagaaattccaaggagttcccaaaacagcttaggctctggtcagttggaggagctcacagttggtccagagccaattccaggttctaacatcggggtagccaccttcaggatggggccaggttggcaggtgagcccacctgactgatcggtgaggaagaaagaacattagccctctccaagctgttgccttcatttctctgtcactctgcttactctaaagccatctttttatcatggtttttaaaatcaccatgccataaataatttttttaatgtgagccatgacattgaaaatgttttttgaaaagtgccatcttgagggaaggcatgccatgtgctccagggaatcaaccgctcttcctgctttactcccagtcatacttctgagttagccaaatgtgttaagaaagtacttggatttgcagacatgatggacataaatccagattactctctaacctgaaaatatctcacccttctactcttcaagagtctctgaaactctcacaatgctaatcattataggtgaggaatttcatggctcacatttaaaaaaataaatcatcttaggttccatcatctatgaatactaggtatggaacacaaagcagatctatttggaaagagcagagggaaagagctggagtctaggaaggcccaagtggtgatgctttagtggaagattctaagcagccagcagacagctggagaatgctaagtaactgaggaccacacagtctgggcaaatgaaaggaagggaggtaagaaaaaagatggaatgagccaaatacaaattcacttatcacacagttttaactcaagacaactatggtgaaggtcaaaactaggtcatcttgctccaggccattacacacaataacatggcgtggtcttttgaatacatgatgcagtgctgtacattagaccagttctcattaccaatatagatggcagtaatatcattgtaaatgtggaggatgtgtgtgtatttttaaatgtgcccactcagatgacaaactgaggggtcctcacaaaagaaatgcaaataggaaagtctccctttaacatctagaaaaaaattctagaaacttttcaattttattcacatacatttagttgtttcacaactataactgatccactaattttggccagacattttggaggtttatttcgttacaataagaaaacataaggtaagttcattgcctcaaagcataaaaccctggattatcattatcacaatagtatcatctctgcatatgtcaggaagcacatttagtgtctggttataaagagaatagtttataaaaacgccttaatatgacataatttttactttaattccacacaaaacttttttgcaaactttcaaaaaataaaactcctctccccagactgacagagcatttatatttaagaggcagaatatatttttccagataaattaaggaaatatcattgatattaattagtcttaatattatgtagacatttacctggtgaatatattctatacagacctgtgtctggaacgtaagttataatttatttgtaatgaaataaattataatttaggaagcattcaagagaataaagcagtgatggagccagtgaataaaacactgggacctagtgagtttctccctcaaatctctgtcatgcgcattcagaatcccagattcttccatcacagtaggagtaggaggccctgattctctttacacttgcagactatccatcgacagtctggacttctgacgtaaggccattatctgccatgctagtgccagctcaccactgtcaatgcctctcgttggtgtctggaactcttcgggctttttagtttttcacatcccatgttgtgtttttgagtaatagaaaggttacacaacaaaaaataaaaattctgctaacacaccaagtccttccattacaccaagggataggatcccacttcttggtgaccccatggagtaaagagtagtagataggccaggcgcagtggctcatgcctgtaatcccagcactttagaaggcgagatgggtggatcgcttgaggtcaggagttcgagaccagcctggccaaaatggtgaaaccccgtctctactaaaattacaaaaattagccgggcgtggtggtgggcacctgtaatcccagctactcaggaggctgaggcacgagaatcgcttgaacccgggaggcagaagttgcagtgagctgagatggcgccaccgcgacaggacgagactccatttcaagaaaaaaaaaaagaggagataaaccagtaaggagtttcaacgtgcagaaatataagtaggaaggtaaatgtacttggttttttgtttgctttttgtttgtttgtttttctgagacagagtcttgctctgtcgcccaggctggagtgcagtggcgcgatctcggctcctgggttcacgccattctcctgcctcagcctcccgagtggctgggactacaggcgccaccacgcccggctaattttttggtatttttagtagagaccgggtttcaccgtgttagccaggatggtctcgatctcctgacctcgtgatctggcagcctcagtctcccaaagtgctgggattacaggcgtgagccaccacgcccagccgtatatgtgtattttttaatgtgtccattcatgtggtaaacccaggaatcctcacaaaagaaatataaatcagaaatgatgagaaaatcgcagaaagtaataaactagcagttagttaataacatgatactgtaatttttattagaatattagggtgcacaaaattaattattttctccgtattaatcagttctagtcagacttttatccagatgccctgtattaggttctgtaaaagagaaaagaataactcagggcagattcaggacatggcaccaagatgattaacatgctgggaaaagctgaggggaggtttaattattgtcttcaggtgtgtgaggggctcccacacagagtacagtggccactggagaatggaagtgaagccatgtttcagtataaagcattaaacctaagaaaatattttttggctttaaatattgttgaataattgattcaaacaatgcattggattaaggaatcacttttgaagatctttcaaaattagatagtttttcatctctctaagaaaggaatgggtaaaatggcttctctaatttctctagtttgttaatttctctaacctagtctctacttctctaatttttttaatcgcgtccattcttgattatctgtgactttttttctgtaaagctgagatttaaacataacatacccgatcttgctttggaagttctccaactgaaaagcatcacaatattgagattatattctcaacaattataaaatgaatttttaactttgacagtcccagtaagaacttaaagtttgtcgtgaagcaggaacatgtaaagaaaaccagtcaaaaccaagatgttctggtaacattgatgtgtttcactctcccaacccctgctgagtctctttaacccagtaaagtggagtaatttcataatggcacaaacaggacacaactggaaaaagaaaggaaataactggatgtcatgatgaagctttccttttaaaagtttttaaatccttttttgttcattgtcagggacaaaggacctcaaggagatgaactgctgtttccttgttattccctccccaaacatctaacaagcacttcaagtgattctcctacctcagcctcccaagtagctgggattacaggcatgcgccactacacccagctaatttttgtatttttagcagagacgaggtttcaccgtgttggacaggctggtctcgaactcctgacctcaggtgatcctcccacctcagcctcccaaagtgctgggattacaggcatgagccaccacacctagcccatatcttagatattttcctaagcaaaaatatttacctatagctgtttctgtagagacagaataacacagtgcaggatgacgtttaactaaattatgcaagctactgaattactattgctactattttttcttaagtgtgttcttatatgctcttacagatttagcctagagtcttacacgtagtaaatactcagtaagtatcagagatttatttaggaaggagggaggtgtcttaatctgcaaagtttctctattttgttttgcttgctaaagtcagacaggctcaaaaaattataaacttttgctctttgaaagattctgcttacaaaataatgacataacccccagagtaaaaacaagcattcgcaaaacatgtatcagataaaagacttgaatccgagacaaataaataactctcacaacttaataataagacatattgcctagtttttttaaataaaaaaagatttgaacaaaaatttccccaagaagatttacggatggtaaatacacacatgaaaaagatgttcaccatcactagtcaatacagaaatgcaaattaaagctacaatgagataccattacacaccaaggagaatagcaaaaaatttttaactgacgtaccaagtgttggcaaggctgcaaagcaactgcagctctcatttgctgctggaatgtagaatgtttcagccactttggaaaataatttgtcagtcttatatagctaagcatgcattgactatttgacctatcaatcccatttctaagtatttgcccaagagaaatgaaaaaatatgtgcacataaagacctgtaagctaatttttatagtagacttattaatcattgttaaaaactggaaagaactcaaaatgttcgtgaacaggcaaatggatagacaaattgtgaaaaattacatgatggaaattactcagaaaacaaacacaaaaaaccaactattgttacatgcaacaacatggatggatcttaaaaacaacatgctaagcaaaatgagtcagacacacacaaaaagccacatattatttaatttatgtgacactctgaaaaaggcaaaattataggaacagaaaacagataaatgattattagaggctgggaataagggagagattacacagaagcatgacagagcctttaggcgtaatggaaatattctatatctaaattggggtggagattacatcactgtacacttttttgaagacttcaaaaattataaatcaaaaatggataatttttactatacgtaaattatacctcaatagacctgatttttgcaaaaaaggatatatacgtacgaatgctcattctgtgccatacaaagatggagtcaagcagcttatcttccaatggtgatgagaactgctaggaaggattagatcatgtgccacaattgcattccatttcgctagttgactctaagccattagggcactttaaaagaaacaaccaccatccacaaccgccatgaatcagcactaccccaccgccacccccagtcacataaccaagcttttcacattttatttggtttgactttttgcttttttttttttcctttaagtgttaaattgtcaaggtggtggcccaatcacccccacctgtcctaacatgtttcacatgccctttacaggattttaaacttaactgaagtcattttctaaagggcaataatggaaatgttatgggcagattgcagtgcatagcgcatggtaaagcttttacttaaatggatcctgcccacaaaagtaggaaccctaacatcaccacagcaggcccacagcagtgatggctgtgggaaaaaaaaatcatccggaggattcatttccaccttattttagaccttttgctgtaattccttatataaaaatttatttttttccttgaccattaatactgataattatatctgtatttcttaagaatattatgagttgccatttctgcatagtagcagattaaatttattcaccttacggatatattattatcacagataataactgcagcatgataattatcattaattattcatttggattaagaggcaaataggcttgtattcaagggtcttccaaagcactgttcattgtttctgagccctgtgtgccagtgtgactaattcatactcttttctgagccactgttgacatctgacgggtcccatatgtatttatttgaaaatataataaaaggaatgagtgcaccatatcaggatggagtcactaaaacagacatatggtttcttttttgccctgtaagtgagggtatgcaatcttctgttaaagtcaggctgttgtgagcattgcttcagtagtatgtattccctttctgtgcatccttgactcagactatttaagctcatataaacttgtgtatttacataatagctttttgcaaaaataataatgtggtaagagacttactttatccttcattgagcaaagggttgtttgtgctcccacttgaagccccttgagttgaatatgaaaaaaaaagcctctgcaaagtttataaaatctgtagagaaattaagaagagaagggagatggaaaaataaaagatgatgtatcttacaaacataatttttttttatttttctagctaacatacaccaaaattgagatatgtgtgtatttacagagtctcttttgtattttctcttggtcttagtctttacttctttgtaatctgtcattcatatttattcttttaaagcagatataaaatggcagtttgaaaactatgccagtgaagctgattttgaagataggatgcagttcttcagtgtctttaacatagctaggactgcatttaaaatgactgcaggattttttcttattttctttctttgtctcttttggtgatgcaagaaagaggctaatatattgtgctaagtgttgctttttaaagaattttttttttttttgcttatatttgtcaatatattcttatgagatcatttgtttcctcttcataacattcctttcaggtactatagggcagctaggatcattcccatttttagataggaaattaagttagcagaagattaagtagtatttaatgaggagtatacagtggtgagactaaatcaggaacccacatctcctgatccgcaattcctctttcggcgactctctgagtgcagctgtgaatagtctgatgtgaatgatgaagaaacttaggaaagagctttgaaaactctgccagatggaactgcaccaaatttcagagcaagaaggtatctcaggagtggtggccatgaggctttgctggtataactcaatgcagcttttttaacatttttattgtgataagaacatgtgacaagatctaccctcttaacagatttttaaatgcacaatacaacattataatcttcagtcacaatgttcagcagatctccagaaggtattcatcttgcataactgaaactttatactcattgattagcaacaggcttcaactaatcatcccctcccccagcctccactcctgttttacacctactaacaatttgagtttggtcattcaagtctaacagaaggctgatgtccagaaacaccttcgtgagcagtatattcatgctattataatgcaggccttattctattcttgagtagaatttccacttttaatttatcatacttataataacaataattagtacttattaaacacttactatatgccaataacttcattaagcacattatctgcagacaaaatgggtgtccaagcagcttttccttaccaaggacccgtttaggaagaagtcccaatgcataaaaaatcaatttctttgacaattaacaaagtaggagaatgtctttaaaatatttatccttggggatttaagtctaatatccatttactcatctgttaagttttgtttgtttgtttttgttactgttttttgttttgttttttgtttgtttgtttgtttgttttaagacggagtttcactcttgtcgcccaggctggagtgcaatggtgcaatcttggctcactgcaacctccacctcccaggttcaagcgattcttcttcctcagcctccccagtagctgggattacaggcatgcaccaacatgcccgactaatttcgtgtttttagtagagacagggtttctccatgttggccagactggtctggaactcccgacctcaggtgatccgcctgccttggcctcccaaagtgctgggactacaggcgtgagccaccacacccggcctcgtctgtaagtatttactgagtacccagtatgggaccagggtctactctaggaaacagagatataaccgaatagcacagagcccctgtccttggacagtgttcattttcatgatggagacagatgatacacaagtatttcatagtagtgaaaagtgctaagtaggaaaatcgtgtagagtaaagcaatgaagagggacaggtgtaaaagggggcaactccttaggatggggtgatcagggaaggcactgttagctgatggggaatgagcaaagatgtgcataaagggaaacagcaatgcaggtagatgctggggtgcatcccaggcagagggccagcaaatgcaaagatattcacatgaatgcatgtttcaaaaatgaatatgaacccacaaagcatcttgcatcagataaaaaatgttcttgccgactatatttaatttgttgtcagcctctttaattttcctctgaacatttttttctttcttgctctgaatatgattttcttctggttgagtctctttgatctgattgtttatctatttctttttggccatgttatgttggcatttctgtcaaccccctaaaaacagattctaaaaatggaatattcttctaatcgtcatgatctctagaatataaaataacctggcaccatgaaaaaaaaatggagtagtgaattactgttgctttataattggattacaataagttttgatggattggaggaagagacaaaattacatgaattgtctctcctcatgcttttcctttttctggaaggaaaactgactttacctcaatcatacttattaaaaaataatagttaagagttagcatttcttgaaaatctgcgttgtgccaagggcttcactaaacatttcacgtgttatttccaatcataatagtagccctgtgtggcaggttactgtcaccttctgaaaaccccattttcagagaaggaaactgaggttcagatagaataactgtccaagggttgtccaggcaaacttcccttgcaccaaagcttgtgctcttaatcatcatctcctgcgtgcagtaagagatggcaactatctttaaatatagggtgatattatcagattcctatttaaaatagagaattctggtagccatgtgaacggtggattaaggatgagcctggagttaagagaagagggagatgattccagtttcgaaagaagacaggaccttaaactaacagtgttgtcagtagtgattacagtaacaatcagttaccctctggagtatgcctattgaagctcccatccaaaatcaggtgaatgtgggtagaaatgtgtattcaaataagccacaaaataataaatgtactatattttatgtaatctccctatagcaaaagaacactgccctctattgctttttgtctcagggctctcaatggtccaaatgatgtcagagaagagggtgctgttagtcaatgggcacagctgttgagagtttcaaatgtgccacagggtgaccaataaaggggtcccaactaaactatcagtttaccactagcactcagaaatctcaaccagttcttctaaagccaatataggcttcagcgctctgccctgacagaagtgataaagaggctctgatatgtttgcacaattgcaccattttcaaactttattgaaaatgttagtaactgtaattcagttctctaatctaaatcgccatacagaacacattgaatatacttttatgccttgctcttgaaaagatggaataattatgaatataaatggcttctgcttccttcatgtgaaaaaagcattatatacatataagtcaaataaagtaaaagggagaaatagatgcagtgtaataatgataagaaactataatatctgcatggaggtagataccaaattgccactcattactcgaatagggagaaagttagtaggcaattagcaacagaagtgccaagtgcaaggataatttgtaagacaacaataaacatagtctatacccaatgagatagaaagaaagagcaagcagtagtgccaataaaacaagcagagcagccatgggagcgactgcgtttacataatgagaaaataaaacaagtcttccccattcctcatcataacttccagcatcttgattttcagcttgttctggaccagaagtagcaatagccaagttcagaaaattgtagtaatcataagccacatgatgtgaaaacacttgctttcagctaactaaatatcatcagtgcctagtcacagggcaaggaaaccacttctaaaaaggagctaaaaattagaaagcaatagttcattccttgaaaatcaaagaacaataattttgcaatcgtgaagaaggaccgaaggaatataaatcagcccactcaggaagattcctatacatgggaaattattatgatgaagcatgtttaaaataaaagtttaaaataaacaatgattgaaagaacatctaacccatcaactaattttcggtatttacctgacccaaagcattcaagaccaattaaaatgacctagtttcaatgatctttagaaagactttaccatttccctcaaaaatctattcattgtgtgagaaagcttttaacatgtgtgtaggcataactatttttatatgtcatataaacaatgaatgaagactgcaaatcatattacgtataaacatttcttcaataatttaagaaattcttaaatgtatacacatttcatatacattatctcatttaatcttcacagccctataaagtaggtactattctttttttttttttaattatactttaagttttagggtgcatgtgcacaatgtgcaggttagttacatatgtatacatgtgccatgctggtgtgctgcacccattaactcatcatttagcattaggtatatctcctaatgctatccctcccctctcccccggccccacaacagtccccagagtgtgatgttccccttcctgtgttcatgtgttctcattgttcaattcccacctatgagtgagaacatgtggtgtttggttttttgtccttgtgatagtttactgagaatgatgatttccaatttcatccatgtccctacaaaggacatgaactcatcctttgttatggctgcagagtattccatggtgtatatgtgccacattttcttaatccagtctatcattgttggacatttgggttggttccaagtctttgctattgtgaatagtgccgcaataaacgtaagtgtgcatgtgtctttatagcagcatgatttataatcctttgggtatatacccagtaatgggatggctgggtcaaatggtatttctagttctagatccctgaagaatcgccacactgacttccacaatggttgaactagtttacagtcccaccaacagtgtaaagtgttcctatttctccacatcctctccagcacctgttgtttcctgactttttaatgatcgccattctaactggtgtgagatggtatctcattgtggttttgatttgcatttctctgatggccagtgatagtgagcattttttcatgtgttttttggctgcatagatgtcttcttttgagaagtgtctgttcatgtccttcgcccactttttgatggggttgtttgtttttttcttgtaaatttgtttgagttcattgtagattctggatattagccctttgtcagatgagtaggttgcaaaaattttctcccattttgtaggttgcctgttcattctgatggtagtttcttttgctatgcagaagctctttagtttaatgagatcccatttgtcaattttgtcttttgttgccattgcttttggtgttttagacatgaagtccttgcccatgcctatatcctgaatggtaatgcctaggttttcttctagggtttttatggttttaggtctaacgtttaagtctttaatccatcttgaattaatttttgtataaggtgtaaggaagggatccagtttcagctttctacataggtctagccagttttcccagcaccatttattaaataggaaatcctttccccattgcttgtttttctcaggtttgtcaaagatcagatagttgtagatatgcggcgttatttctgagggctctgttctgttccattgatctatatctctgttttggtaccagtaccatgctgttttggttactgtagccttgtagtatagttcaaagtcaggtagcgtgatgcctccagctttgttcttttggcttaggattgacttggcaatgcgggctcttttttggttccatatgaactttaaagtagttttttccaattttgtgaagaaagtcataggtagcttcatggggatggcattgaatctataaattaccttgggcagtatggccattttcatgatattgattcttcctacccatgagcatggaacattcttccatttctttgtatcctcttttatttcattgagccgtggtttgtatttctccttgaagaggtccttcacttcccttgtaagttggattcctaggtattttattctctttgaagcaattgtgaatgggagttcactcatgatttggctctctgtttgtctgttgttggtgtataagaatgcttgtgatttttgtacattgattttgtatcctgagactttgctgaagttgcttatcagcttaaggagattttgggctgagacaatggggttttctagatatacaatcatgtcatctgcaaacagggacaatttgacttcctcttttcctaattgaataccctttatatccttctcctgcctaattgccctggccagaacttccagcactatgttgaataggagtggtgaaagagggcatccctgtcttgtgccagttttcaaagtgaatccttccagttttgcccattcagtatgatattggctgtgggtttgtcatagatagctcttattattttgagatatgtcccatcaatacctaatttattgagagtttttagcatgaaggttgttgaattttgtcaaaggccttttctgcatctattgagataatcatgtggtttttgtctttggttctgtttatatgctggattacatttatggatttgcgtatattgaaccagccttgcatcccagggatgaagcccacctgatcatgctggataagctttttgatgtgctgctggattcggtttgccagtattttattgaggatttttgcatcaatgttcatcaaggatattggtctaaaattctcttttttggttgtgtctctgcccggctttggaatcaggatgatgctggcctcataaaatgagttagggaggattccctctttttctattgattggaatagtttcagaaggaatggtaccagttcctccttgtacctctggtagaattcagctgtgaatccatctggtcctggactctttttggttggtaagctattgattattgccacaatttcagatcctgttattggtctattcagggattcaacttcttcctggtttagtcttgggagggtgtatgtgtccaggaatttaccaatttcttctagattttctagcttatttgcatggaggtgtttgtagtattctctgatggtagtttgtatttctgtgggatcagtggtgatatccccgttatcattttttattgcgtctatttgattcttctctcttttcttctttattagtcttgctagcagtctatcaattttgttgatcctatcaaaaaaccagctcctggattcattaattttttgaagggttttttgtgtctgtatttccttcagttctgctctgattttagttatttcttgccttctgttagcttttgaatgtgtttgctcttgcttttctagttcttttaattgtgatattagggtgtcaattttagatgtttcctgctttctcttgtgggcatttagtgctataaatttccctctacacactgctttaaatgtgtcccagagattctgttatgttgtgtctttgttctcgttggtttcaaagaacatctttatttctgccttcattttgttatgtaccccgtagtcattcaggagcaggttgttcagtttccatgtagttgagtagttttgagtgagtttcttaatcctgagttctagtttgattgcactgtggtctgagagacagtttgttataatttctgatcttttacatttgctgaggagagctttacttccaactatgtggtcaattttgaaataggtgtggtgtggtactgaaaaaaatgtatattctgttgatttggggtggagagttctgtagatgtctattagttccgcttggtgcagagctgagttcaattcctgggtatccttgttaactttctgtctcgttgacctgtctaatgttgacagtggggtgttaaagtctcccattattattgtgtgggagtctaagtgtctttgtaggtcactcaggacttgctttatgaatcttggtgctcctgtattgagtgcatatatatttaggatagttagctcttcttgttgaattgatccctttaccattatgtaatggccttctttgtctcttttgatctttgttggtttaaagtctgttttatcagagactaggattgcaacccctgcctttttttgttttctatttgcttggtagatcttcctccatccttttattttgagcctatgtgtgtctctgcacgtgagatgggtttcctgaatgcagcacactgatgggtcttgactccttatccaatttgccagttgtgtcttttaattggagcatttagtccatttacatttaaagttaatattgttatgtgtgaattcgatcctgtcattatgaagttagctggttattttgctccttagttgatgcagtttcttcctagtctcgatggtctttacaatttggcatgattttgcagtggctggtaccagttgttcctttccatgtttagtgtttctttcaggagctcttttaggtcaggcctggtggtgacaaaaatctctcagcatttgcttgtctgtaaagtattttatttctccttcacttatgaagattagtttggctggatatgaaattctgggttgaaaattcttttctttaagaatgttgaatattggcctccactctcttctggcttgtagagtttctgctgagagatccgctgttagtctgatgggcttccctttgtgggtaacccgacctttctctctggctgcccttaacattttttccttcatttcaactttggtgaatctgacaattatgtgtcttggagttgctcttctcgaggagtatctttgtggcgttctctgtatttcctgaatctgaatgttggcctgccttgctagactggggaagttctcctggaaaatatcctgcagtgttttccagcttggttccattctccccgtcactttgaggtacaccaatcagacgtagatttggtcttttcacatagtcccatatttcttggaggctttgctcgtttctttttattcttttttctctaaacttcccttctcacttcatttcattcatttcatcttccatcgctgataccctttcttccagttgatcgcatcagctcctgaggtttctgcattcttcacgtagttctcaagccttggctttcagctccatcagctcctttaagcacttctctgtgttggttattctagttatacattcatctaaatttttttcaaagttatcaacttctttgcatttggtttgaatttcctcctgtagctcggattagtttgattgtctgaagccttcttctctcaactcatcaaagtcattctccgtccagctttgttctgttgctggtgaggagccgcattcctttggaggaggagaggtgctctgctttttagagtttccagtttttctgctctgttttttccccagtttttcctctgttttgtggttttgtctacttttggtctttgatgatggtgatgtacagatgggtttttggtgtggatgtcctttctgtttgttagttttccttctaacagacaggatcctcagctgcaggtctgttggagtttgctagaggtccactccagaccctgtttgtctgggtaccagtagtggtggctgcagaacagcggattttcatgaaccgcgagtgctgctgtctgatcgttcctctggaagttttgtttcagaggagtacaatgtgcaaaactttgtactttctgaggtgtcagtctgcccctactggagggtgcctcccagttaggctgctcaggggtcaggggtcaggggtcagggacccacgtgaggaggcagtctgcccgttctcagatctccagttgcgtgctgggagaaccactgctctcttcaaagctgtcagacagggacatttaagtctgcagaggttactgctgtctttttgtttgtctgtgccctgcccccagaggtggagcctacagaggcaggcaggcctccttgagctgtggtgggctccacccagttagagcttcccggctgctttgtttatctaagcaagcctgggcaatggtgggcgcccctcccccagccttgctgccgccttgcagtttgatctcagactgctgtgctagcaatcagcaagactccgtgggcataggactctccaagccatgtgcgggatataatctcctggtgtgccattttttaagcgcatcggaaaagtgcagtattagggcaggagtgacccgattttctaggtgccgtctgtcacccctttctttgactaggaaagggaactccctgaccccttgcgcttcctgagtgaggcaatgcctcgccctgcttcagctcgcgcatggtgtgctgcacccactgtcctgcacccactgtctggcactccctagtgagatgaaactggtacctcagatggaaatgcagaaattacccgtcttctgcgtcactcacgctgggagctatagaccggaactgttcctgtttggccatcttggctgccctctattcttaaatatcatatatgagaaaccgaggcttaaaattttgttttgttcaaagggaagctagaatttaaatccaggtctatcagattgttaaagctgagctcataacaatagagaacaatataaattatagtataggagatcattctggaaaataacaaggacctagtgtcagcctaagttagaatcctgcctctgttcatgcccctcttctgtttaaaaccattcgacagcttaatgtatgtaatcctcacgatagccctatgagagaagaagaatgatgaggaggaggaggagaagaggagcaggatggaaatggtggtgatgataatgaaaatgttcattttacacgtgagaaaaattgagaggttaggccaagtgtggtggctcatgcctgtaataccagcactttgggaggccgaggcgggtgtatcacgaggtcaggggttcaagaccatcctggccaagatggtgaaaccctgtctctactaaaaaaaaaaaaaaaaaaaaaaaaaaaaaaaaaaaaaaaaatagccaggcatggtggcgggttcctgtactcccagctacttgggagtctgaggcagagaattgcttgaacctgagaggcagaggttgcattgtgctgagatcatgccactgcactccagcctgggtgacagtgtctgtctcaaaatataaaaacaacaacaacaaaaacaaaaaaaaatgaaaaattgagaggttaagtaacctgctctgagtcacctactagctaaactagaagccaagttaatctgcctacaaagcctatgattttagccactctactaaaatcctggaacattctttccccatctaagtgttatccttcacatctcagttgtatcagctttctattgctatccgacaaatgccacaaacttagctgtctaaatcatatatgtatatatatgtatatatatatatagagagagagaatatatgtatagaataaatatatactctaaatcatacatatatatatgtattctcttaacagtttccatgagccaagagtctaaatgcatcctagttaggtcctttgatcagggtctcacaagacttcagtctaggtattagctggtctacattcttttctggagcccagagtcctcttctaagctcacatggttagcagaatgtaattccctgtggttgtaggaccgaggtttctgctttcgtactggctgtcagccaggaacttctctcagattctagaggccaccacagttccttgtcatgtggcctggcctactcactgactctctcacaatatggcagcttacttcatcaaagccaggaggcaaatctctctctcttctagtctcttttaaagagcttacctgattaggtcagacccactcaaggcagtctccctttggttaacttaaagtcaattaatgagaagccttaataatatatgctaagtccccacacctttgccatataatttaagataatcacagaagttatatcatgtcacctttgccatattctatggatagaaagaagttacaggacttacccaacacagttcaatggaattgaactgtggaaaagacagttcaatgccattactcattggagatcatcttagaattacacctaccacatcagcgttaacatctcttcctttagtaccttgctgacccctaaaactgaattagtcccaactcccatgtactttcctgcacttaaccatcatagaatgtatcctacagtattgcgatggctcattccctgctaaaagttaagcccttccagccagagattttctcttgctcaccagcgtatctgcagcatccttctcagtccttggcaatttttcagcatgtgacaaatggaagcaattattattcacacaacattcttcagaaatattagtgctttccaataaataaggtttaagtgtcatattacctgcttggatttttacccagttctcgtattcagccaatatcttcacagacacataacaagtcaaaagtttacattacactgacaaataatattcctcatatcgccgctaacagcagatttctggtttatttattttctcgctgttttcttatagagatgctctaatgcttgcaatgccacttatatgttctagtttcacaatgcattattaagtaagcagaacttcaagccaaagtttttttgcattatataaaaagaaaaaaaattaccgaatcaaagactgaaacagtagtcctaaattcagggttaaaatgaaaaaagtgtaaaccatggaaaaattatattagcacaatgttttaaaacacctacaggcaagaaagtctatgaggaaaaaaataaaatattttgaaacaaaataaagggcaaagttgcaacagaaaatagatccgtagaggggaaaatgttttaaagtcctcaaccgtaattccacaatggcttactctatctagataagcaattcaaattacagtggaaactggaaactgacatttatcattcacttaaaaatctacaatgctatgtatctgcattcataggtaatttaaattccataatattacctttaaaaaatatgtctgaaatttaactttttcacaagtggagacagtgtatactttttcaggctatagctgaaactcccagaagtttgatctatgttactttagcaattatgcaggtaaagaactaccatgtggacaatattttaatagtcctttgctctgtttccaggtaagtctatcactgggataaccacaaacatgtgacagtgctgtaattattaaagacataaagacaggcttggaattcagaagactttcaaatgatggcttacagcagtcttttaaaaagttataaggaaactccataaccagtttattgctccattaggaaaaaaaaaaagatatcagctgtctccaacatgacttaaggattttctctcagtgatggacctagcttcaaaattcccaagaaagcctgtaaatcatgcataaaagtagatgtaagtttaaatgctctgggctgctcagagtggagagaggaccaaaagatggagaagaaatgtttggtccttgaaaagtcagagagtaaataaatataagaaagtgagcctagaagaacagagtttatttcttattttgtgccttatctatgtttaaagacagacctagaatatgctctgtacctggcaattgtgctctcttgtcccagtaagaataccatgaaaaaggaggatgtacaaggcccagcaaaccttttgcaggctgaagagaaattggcagcataatgatatctgaaatctatatttttcaggctcttacagtaaactctgctttctgctgtctattaatagctttcagttctgcaaatctgtagtcaaaagatagccaatgtccataatgatgaccagagggctgcaagagcttcctgccccatcaagagatgtcacatgtccttcaagccctgagctccaaccattcctgtcaggcttgtgctattcagcacaccttctgggaggaagccctatgcctttcttagggtcatttctagcagctcagaattcctccccatgctagcatgacactaagcccaaagtaaggggctccataagtacttgttgaattaatgagtggaagtcaatgttatatcaatttttcccccttaagcttgtctttactcctcaggctgcagtggatagcactatttactcgtgcatattggggattttcctctgaatgctcatgaacttcaccctttcccaaggactctacactaagtgtccgtattttgtcaaaaggtctcttataatttcttttatacaatacccacccctgccaccttacactctgattgcctgcaacaatatctggcacataggtggtgctcaatacatttcccttaccacattatcttttctgggttgctatgatactaatactactaatacccatacacttttctaaattgcattagtcactgtttttcagacacaacctaaattcttccctgttgttctctcatttcttaatgtcctccatgccttggtccatcagtgaatattctctttattcgcaaaggcctaggtcaaatctctcttcctccaggaagccttctttggctattaatgttcttccctactccaaactccaatactgctgaggctgatcctctattccattaattcccctcacaaagaaggcttaaaataaaatgtaataaataaacattttattttaggaattcgagtgttttatcttcaagatgaaaatgactttagatttaatcatagaaattttggacatttggaataaggctgcttattctctaataaaagcagaatacaaaggtaaatatgttaactttacccaaaggaatgatctttactctcaacattatataatgactacaaatcaatttaatttggtaaaaagaaagaaagaaagaacagtaacaattgtgaacattttgaggcaatttgttaattgactgaattttaattgtttgtttatttttgtttgagatggagtctcactgtgttacccaggctggagtgcagtggtgcaatctgggctcgttgcaatctccacttcttggattcaaatgattctcctgcctcagactcccgagtagctgggattacaggcatgcaccaccacacccagctaatttttgtatttttagtaaggatgggggtttcaccatgttggccaggctggtctcgaactctggacctcaggtgatctgcctgcctcggtctcccaaagtgctgggattacaggttttagtcatgcgcctggcctgaattttaatttttaaaatagctttccctgtgctaaacagaagaaggcctaagctttggatttctgaacagatagcacaatactccatgtttataaaattgcccaatcaattcaattagtgaatatttctaacacggtttgtaaatggtatgtacaaaaagggctgttttttcccccaagataacccagttaggcttgacagcttgtttataatagtaccctgaagacacattctacagtgctcaattatataaatatacatttgagatacacactgtggctcataacatttgttaaacatcagaaatatgaagtccatccagttagagtgtgttctttgtgcctctttaaatagtatgaagggaatgagtctctataccttaaaagtgcatctataacattctgcttcaattagcatgtcaaactgtggaagtcagaaaataattcagaggcttcagtgaagaaaaaattggggggatcccaaaagatatgatgaaaatatataccaagaagagatggaatacaagttatgggtaattctgagaggcacaggaaaatagtcctctgctaagacatacctttgcagggtttaaatttctaccattaatgattcatcctttcagaccaaaacatcccacagaaattatctattaaaatggaaacatcacctggaatatgaatacagatcagctatcagcatcatagactcacaagggccaagaatctctggaaaaccaagaattgtaacaatagcaacaatataggatgttcatggctcttctcccaccaattccttaagagcctccactctcttcaaattcctttgaaatagctccagaaattcccaaaggggttttcagctgcattccagaaattgcttctactggttgccaaggtacacctaccattttggttatcttgtagctacacttaagcaaagagataatggtgctatgagaccaccagggactctatgatgaagaactctgccttccgaggtccctgctgctgagtgccttcaatgttcagctgctgatgacagatgctgaaggaattcatatgtttcccttatagccaaagttctagtcaaccagcactcttatgtcttgagcctcaatgtatcagcattacaactttgctcactattttattacaattcttgtgtcccaggactctggcttaaatcatttgaggtaagccatgagggcaagcttagtgagagccaagtgagaacctgtggtatccctactctctgacaccagttcttttcatctgggaaataccttgttctcacatataaagatacaagtaaagagattttcaggtttaaaaaaaaaagttgattaaatatatacctttaatttgattctctcctaaaacaccccaaaaactacagaaattcgagttatttaaaaccacaatttcttttgacttccactgttgcatttgagaagtctgaaccactgagtattcttaattctttgcatgtgaccaattgctctttgttttatttccaaactgaaaaaaaatctgaaaaaattgctgtccatcctataacactggatagagccgagatatcaataaagtgtcagatagagaaagacattttaaaacataaaatggctcaaaaaaacttatctccctcagatgttttctcaggaaactattggaagatttactaaaacaaaacaacaaaacaaggcagtcatacaagaaagacaagaatgagagccaggagcaggagatctaactcagagaggtatatggaacctcaggatgaagaaatgtttgcaaacttcaagagcagtcagttcaggccagtgcagggctggagattctgcgagagacttcttcaagaaaatggaactgttgagggaggttccaagatggccgaatacaaagagctccagtctacacctcccagcatgagtgacacagaagagggatgatttctgcatttccaactgaggtatcgggttcatctcactggggcttgtcagacagtgtgtgcagcccactgagcgtgagccaaagcagggcggggcatcacctcacctaggaagtgcaaggggttggggaattccctttcctagccaagggaagccatgacagatggtgtctggaaacttgggaccctcgcaccccaatactgcactttcccaacggtcttagcaaacggcacaccaggagattatatcccaggcctggctcagagggtcccacacccatggagcctcgatcactgctagcacagcagtctgagatcaaactgcaaggcagcagcaaggctgggggaggggcgtccaccattgctgaggcttgagtaggtaaacaaagtggccaggaagctcgacctgggtggagcccaccacagctgaagggggcctacctgcctctgtagactccacctctgggggcagggcatagctgcacaaaacacagcataaacttctgcagacttaaatgtccctgtctgacagctttgaagagactagtagttctcccagcacagagtttgagatctgagaacagacagactgcctcctaaagtgggtccctgacccccaagtagcctaactgggagacacctcccagtaggggccaactgacaccacatatggctgggtgcccctctgagacgaagcttccagaggaaggatctggcggcaatatttgctgttctgcaatatttgctgttctgtagcctcagctggtgacccccaggcaaacagggtctgaagtggaccaccagcaaactccaacagacatgcagctgagggtcctgactgttagaaggaaaactaacaaacagaaaggacatccacaccaaaatcccatctgtacataaccatcatcaaagaccaaaggtagataaaaccacaaagatgggaagaaatcagagcagaaaagctgaaaattctaaaaaccagagcatctcttctcctccaaaggaacgcaactcctttccagcaaaggaacaaagctggatggaaaaagactttgacgagttgagagaagaagacttcaggtgatcaataataccaaacttctcagagctaaaggaggatgttcgaacccattgcaaagaagataaaaacattgaaaaaagatcagacgaatggctaactagaataaagagcgtagagaagaccttaaatgacctgctggagctgaaaaccatggcatgggaagtatgtgacacatgcacgagcttcagtagccgattcgatcaaatggaagaaagggtatcagtgattgaagagcaaatgaatgaaatgaagtgagaagagaagtttagagaaaaaagagtaaaaagaaatgaacaaatcctccaaaaaatatgggactatgtgaaaagaccaaatctacatctgattggtgtacctgaaagtgacagggagaatggaaccaagttggaaaacactcttcaggatattatccaggagaacttccccaatctagcaaggcaggccaacattcaaattcaggaaagacagagaacgccacaaagatactccctgagaagagtaactccaagacacataattgtcagattcaccaaagttgaaatgaaggaaaaaatgttaagcacagccagagagaaaggtcaggttatctacaaagggaagcccatcagactaagaatggatctcttggcagaaattctacaagccagaagagagtgggggccaatattcaacattcttaaagaaaagaattttcaacccagaatttcatatccagccaaactaatcttcataagtgaaggagaaataaaatcctttatagacaagcaaatgctgagagattttgtcaccaccaggcctgccttacaagagctcctgaaggaagcactaaacatggaacaaccaataccagccactgcaaaaacatgccaaattgtaaagaccatcaatgctaggaagaaactgcatcaactaaggagcaaaataaccagctaacatcataatgacaggatcaaattcacacataacaatattaactttaaatgtaaatgggctaaatgctccaattaaatgacatagactggcaaattggataaagagtcaagacccatcagtgtgctgtattcaggagacccatctcacgtgcagagacacacataggctcaaaataaaaggatggaggaagatctaccaagcaaatggaaaacaaaaaaaagcaggagttgcaatcctagtctctgataaaacagactttaaaccaacaaagatcaaaagaaacaaagaaggtcattacataatggtaaagggatcaattcaacaagaagagctaactatcctaaatatatatgcactcaatacaggagcacccagattcataaagcaagtccttagagacctagaaagagacttagactcccacacaataataatgggagactttaacacccagctgtcaacattagacaggtcaacgagacagaaagttaacaaggaaatccaggaattgaactcagctctgcaccaagcggacctaatagacatctacagaactctccaccccaaatcaacagaatacacattcttctcagcaccatattgcacttattcaaatattgaccacatagttggaagtaaagcagtcctcagcaaatgtaaaagaacagaaattataacaaactgtctctcagaccacagtgcaatcaaactagaactcaggattaagaaactcactcaaaactgctcaactacatggaaactgaacaacctgctcctgaacgactactgggtacataatgaaatgaaggcagaaataaagatgttctttgaaaccaatgagaacaaagacacaacataccagaatctctgggacacatttaaagcagtgtgtagagggaaatttatagcactaaatgcccacaagagaaagcaggaaagatctaaaattgacaccctaaaatcacaattaaaagaactagagaagtaagagcaaacacattcaaaagctaacagaaggcaagaaataactaagatcagagcagaacagaaggagacagagacacaaaaaaccttcaaaaaaatcaacgaatccaggagctagttctttgaaaagatcaacaaaattgatagaccgctagcaagactaataaagaagaaaagagagaagaatcaaatagacacaataaaaaaatgttaaaggggatatcaccactgatcccacagaaatacaaactaccatcagagaatactataaacacctctacacaaataaactagaaaatctagaagaaatggataaattcctggacacatacacccacccaagactaaaccaggaagaagttgaatccctgaatagaccaataacaggatctgaaattgaggcaataattaatagcctaccaaccaaaaaaagtccaggaccagatggattcacagccaaattctaccagaggtacaaagacaagctggtaccattccttgtgaaactattccaatcaatagaaaaagagggaatcctccctaactcattttatgaggccagcatcatcctgataccaaagcctggcagagacacacaaaaaaagagaattttagaccaatatccttgatgaacattgatgcaaaaatcctcagtaaaatactggcaaaccaaatccagcaacacatcaaaaagcttatccaccatgatcaaggtggcttcatccctgggatgcaaggctggttcaatatatgcaaatcaataaatgtaatccatcatataaacagaaccaaagacaaaaaccacatgattatctcaatagatgcagaaaaggcctttgacaaaattcaacagcccttcatgctaaaaactctcaataaattaggtattgatgggacatatctcaaaataataagagctatttatgacaaacccacagccaatatcatactgaatgggcaaaaactggaagcattcactttgaaaactggcacaagacagggatgccctctctcaccactcctattcaatgtagtgttggaagttctggccagggcaatcaggcaagagaaagaaataaagggtattcaattaggaaaagaggaagtcaaattgtccctgtttgcagatgacatggttgtatgtttagaaaaccccatcgtctcagcccaaaatctccttaagctgataagcaacttcagcaaagtctcaggatacaaaatcaatgtgcaaaaatcacaagcattcctatacaccaataacagacacagagtcaaatcatgagggaactcccattcacaattgcttcaaagagggtaaaatatctaggaatccaacttacaagggatgtgaaggatctcttcaaggagaactacaaaccactgttcaacaaaataaaagaggacacaaacaagtggaagaacattccatgttcatggataggaagaattaatattgtgaaaatggccatactgcccaaggtaatttatagattcaataccatccccatctagctaccaatgactttcttcacaggattggaaaaaactactttaaagttcacatggaaccaaaaaagagcccacattgccaagacaatcctaagccaaaaaaacaaagctggaggcatcatgctacctgacttcaaactatactacaaggctacagtaaccaaaacagcatggtactggtaccaaaacagagttatagaccaatggaacagaacagagccctcagaaataataaaacacatctacaaccatctggtctttgacaaacctgacaaaaacaagaaatggagaaaggatttcctatttaataaatggtgctgggaaaacttgctagccatatgtagaaagctgaaactggatcccttccttacaccttatacaaaaattaattcaagatggattaaagacttaaatgtgagacctaaaaccataaaaaccctagaagaaaacctaggcaatatcattcaggacataagcatgggcaaggacttcatgactaaaataccaaaagcaatggcaacaaaagccaaaattgacaaatgggatctcattaaaccaaagagcttctgcatagcaaaagaaactaccatcagagtgaacaggcaacctacagaatggaagaaaatttttacgatctacccttctgacaaagggctaatatccagaatctacaaagaacttaaacaaatgtacaagaaaaaatcaaccccaccaaaaagtggatgaaggatatgaacagacagttttcaaaagaagacatgtatgcagccaacacacatgaaaaaatgctcatcatcactggccatcagagaaatgcaaatcaaaaccacaatgagatatcatctcacaccagttagaatggcgatcattaaaaagtcaggaaacaacaggtgctggagaggatgcggagaagtaggaacactcttacactgttgtttggacggtaaactatttcaaccattgtggaatagagtgtggccattcctcaaggatctagaactagaaataccatttgacccagccatcccattactgggtatatatccaaaggattataaatcatgctgctttaaagacacatgcacacgtatgtttattgtggcactattcacaatagcaatgacttggaatcaacccaaatgtccgtcaatgatagactggattaagaaaatgtggcacatatacaccatggaatactatgcagccataaaaaaggatgagttcatgtcctttgtagggacatggatgaagctggaaactatcattctgagcaaactatcgcaaggacagaaaaccaaacaccgcatgttctcactcataggtgggaactgaacaatgagaacacttggacacagggtggggaacatcacacactggggattgtcatagggtggagggacgggggagggatagcattaggagatatacctaatgtaaatgacgagttaatgggtacagcacaccaacaaggcacatgtatacatatgtaacaaacctgcacgttgtgcacatgtaccctaggacttaaagcataatttaacaaaaaaagaaagaaagaaaatggaagtgatgactatctgatgtaaatgaaagaacagagaaaagatttcgacaactggagtaaatatttgagaacataggaaactaagacaataaacaagtaattctaattgccaaaaataattttttaaagtgtaggaaaagaaaggtaatcactgtttatcccatggcttagcccttgcatggtacacagaatcaaaatgatgaccatgctgaatattattctaatcaaaattttaaattactatattgggaggatagtacataagaagtgggcattttgtgtatgttggagacaagggaggagagcgctaggtgataatcttccatgtgagaagtcaaagatgcctgattccaaagaaatcaagaggtagcaatataagcattttatttgaaagtatgggagtaaattctaacagaatcagcttaaaatgttaaaagttgctacttcttaagaaaaggggataagggataatgacagctgattgttaacaacacttgtaaacctgggtgactctttaatgtatgtgcatttataagcttaataaaaataaaagcttaaaatatttaagacagtcaagcatcaggatagtcaaccctacaggcatacctaaatcccagggtgtaccgaaaaatgatgcaaggctaaaatgaatgatgctgtcatttgaagtactcccgcagatattgtagcccattcacttctgaaaatagtcctctaaggataaacattagtgtcattatttagtacagatgagaaaactgaggcttggtgagtttaaatgacttgtttgcagtcacaattaatttgctcattcacttattcagcaggtatctatggatcacctcttctgcatcagccaggctagaatttggccacagacttttcagaccctagaatctattttctttcccctatcccaatctgtctcccatgaaaccagattcccaaaactaaagagattccatagacagactctttaaaagaatatgattctaaatggaagaagagcctttaaaaatatgtaattctgtctatgcaagtgagactaatttaaatgagaaggaaatgagattgaaggtcaaagtacctaaaatagctacaatattatctccctttatgagctcagattttttaatatgccaaatgagccagaaagaacttgtaaccaagaaaaagtacagaaaataggcacaaatctataagatttgagtcagaaagattgtgtacccaaacaagataaagttttataaatgctccagatcactaaaaatgattagaaagaatgtggaaagggggctgctcaaagatgttataatgttaacaaataccaaagagctcagctattcttcacttcaatttgtttctattctccatggaggaaaatgaattataaacagaagagagtagaataaatattgctcaaaggtggttgaagaccaaagcacgagaagagataatgagtttatacttaaagaacttatatggacttaaataagtttaatttcccaaacccaatagaattgcatgtgaggttgttgaacttttttgtatatttaattacggagtcatcagtgaaaactcggaggcatctggagaaacaaagattactgaaataggaggaaaggtgaatatcagaaactaaaaactgataaaatggaatagattctagataattctaggtaaattgtttagccatttagtaaacctttaagaagagtgaatcaaaggaagagggaggctaggccttgcggaataaagctatgtgagcaagaccacacgtcacaaaccctggcccttactccagttgctaaagccaccctttctccttctcggccttcacccctcatatctaatcttttagcaggacacatccaaaatatatcttaaatcagtcctcccatctccactgcctccaattgatccaagtcccttcttctctcacttagtttttgtcatagaattctgtaaccggtcttctctcttccattctctcatctccaatcaattcttcaacagcaaagagttctattaaaaatgcaaactagaccatattgctccactatatgaagcatctcaatggcttctcattgtactttagctaatcctaaatgcttataatcatataaggccctgcttgattggactctgtctcattcttcaagttacattatgacttaattaccctttggtacaatctgctgcagtctcactggccttttgtcagtctggaacacactaatcccattctggctgcagagccctaggtgttccttctgcttggaatgctctttccaaattcttcttctcactgctccttctcatcttccagactctgtatttcagtcactcttcaacgatgccttccctggctgctctatatagagtaggttgtacctagaactctctgtctcatcaccttgcttatatccttcataggaccatcccaattgtaagtattttctttgttttaccttgtaattattttattctgtaactattttatttgttttattttgtaattattgtatttgttttgcacctaatataatgcataatatttgaaagaggctcagttgacacctgttgaaagaaggaatgactccatgttgaatgtatttgtttcagaatgacaaataacaaattgcatgtggttttgatgttgatgtgatggctgcagtagcatgatcaatcagattctgagctggggtaaaaaggaagatataccattggatcgatacagatgacataaggacctagcctattcaatacctttgtcagtaacttgcaggaaaagtagaaaacatgcttttcgagtctgctcataacacagaaccaggaggagtagctggcattctggaagacaacgaagacttgggtaatgtcaggtggctaaagtgacatcagagttgaagccaggaagatgctgtttaaactgacgtgggtcttgtagggctcagggaactttctcactgcaaacaagaagaggaagcactgaacgaccaatggttgtgaaaggcagtcattgtgattagggggtactcatacaactcatttacttccctgcctattgtgactaaggctggttcctgcctacagggaattcacagtaataattttagctacaatagttggtctgcaggctccagatacaagttggtcatggtcccatggtagcctgtcatcccatggacctcacatggatcagggtgtccacttctgggagtcatgttgggaaatgtgttgtcagcctagaggattttcagagatgagacaatttagatgtctagaattctaaaaccgagaacatctgataaagcatggtgaagagaactggtgctgtataaccaaaaagataaattatttgagagagccaaaaggctgtcttcacatacttcagatgtgttgtgtaataattggtagagtcactccaggactattctgagtgacagggctgggatgcagaagtgggagccacaggaggcagatcctgcctccaggtaagctgtgctctaagaagaatctatagcttttctacagtctggtaagaggacaggccatccagcaaaggggtgagccactgtggctggcatgtgcaagcatgtacagcatgactttataaagtacaaagaaagaatacgtgtgccatgaaaggttggtgcctctagtcccttccaactccaagggcagcgatgctaagccaccatctgtgaggagagctcacagaggtccaaacagtataagcatatatctaacgtctgttagagagagcagaaattaagctactttcatacttgcgctaagatttacttttgtgcacgtatgccctgtggaacctgtggagttggtgagtgcaatattcctcaaaaagctctcctgttagctttgaactggctatctggctggtgtccacagatgaataaaaactgactgggcgtggtgtctcacgcctgtaatcccagcactttaggaggccaaggcaggtgagaccagactgggcaacatagcaagatctcgtctctacagaaaaaaagaaaaatgttttaattagctagatgcagtggtgtgcgcctgcagtcccagctacttgggaggctgagccaggaggatggcttgagcccaggaggttcaggctgcagtgagccatgatcacgcttctgcactgcagcctaggcaacagagtgagaccctgtcaaaaaaaagaggcactcaattctgtttatgtatacactaagtgccattttcctctgctatatcctgtaatagcagaagaggttttagacaattaaataatacaaatgattaaattgggagtctgttttctaatgaaaggaaactatgattatgtacttttctggcagcctttaatacttcctactagcaatccctctcccctccaacatacacacacacacacacacacacacacacagacactcctcatgtgggttcttttgagtcaattgacgatatagttgaagtgcattaactgacatcttcatcccagcattcacacttaacttgcccgggtaaaaatgtttttattaatagcctaaaaatttaatgagggccctatctttaatatatatatatacacatatatatatgtgtgtatatatatatgtatgtatatatacatgtatatatacatatatatacatgtatatatccactgctccttttacactaaatttataatgagcctttgggaaaattctgacattcttacatgcatattaattcccattaattaacttaaaggctaaaatgcaaataaaagtagttttggtctttagaaagggcagggctcagagtaagagaagaatccctgactcaggatattttctgtgctttagtgagctgctgcctgattcttgattcctgctctctgctaagaccaatattggactacaagacttaagcaagtttcccaagaagctgagtctatttcttcatagtagcatgccaggagatgcatggagtcatagaaagaccatacccaggccaagttcaaatcccagctatatcttacatgaccttacttatacaagttacttatttcaacaaaaagtaaagaggtacaccacaaaagcaacataattcagcagttaatggtggctgcaaagacattttcctgattcttcctttagctaccttcagaaatatcaaagggatcactacagctccatttaagaataagcaaaactgacgtttctcccattttggactgaagaaaatgccggagaaatgtcaaagaatttctcccaaacataaagttctgacatgcctgaaatattattttggaaaaaaacacaaaaagcacaatcagctattatgtccatgatgcaaagatgctaaaaatggttccctaggccttgagatcactggaaaaggagctgcagcaatgttcttgctcagcaatgtgcccgtccccaaatgcacagccacacaagcattactcagccattacatgaggacatatggccaagacagagtttgaacttggcatttcaaagctgatgtttgagccattaaacctttcctccaggataatagcctcatggaagggggatgccggcaggcattcttcatcatctggcctccgaacactgtgactctctgattgtcctacaggaagctctgccacatgaggggaagtaattatgtgcccaaggaaggcagagaatgcactcagtatacttacagaatgtgaagggattacaaggcatatcgctgtgttagaacaagtctctggcaatctactctgtcgagatgcaggtgcctggcacagcccagtgggttgcagcaaggagacaaagggctttcactgctttactttggacccagagaaaaaggcaggagaaagaagaaagaggaagacgaggaaactgaagattttttttttaaatggaaagtagctacaagttaaaagagtgcttcaggaacacaagggaaaaggaagacatatactagcttaattaatagaattcagatgaaagaagggtgaagtaattaaatattcattatagatcctataaaactatgatagaaaacaaactcaatcaaaagatgcattggagaaacaaaaacttcaaaaattaagaatttggaggaaacaagaaaaaatgagcaagttgttcaaattgaaatgtcaatgtgacaaagtgctctatgggctttacatttatttgactgatttgcaagtggcagagcagaattttgtaaaagtagacactgtggaccatagtaggtattgcaagataaaaactagacaagaggatatgtctgcgtttaattcaatttactcctcaatgaaccaaaagcagaaaatttcagaatacaggagaagacaaatggagctcagagataaaaataatgatgataataacaattacaaaaatagccagcattttgctattattaagaagtcaaaaaaacaacaggtgttggcaaggatgcagagaaaagggaacacttatacactgttggtgggaatgtaaattagtacaaccactatggaaaagagtatggagatttctcaaagaactaaaaatagaactactgtttgttccagcattaccactgctgtgtatctagcccaaggaaaagaaatcattatatcaaaaagacacctgcatgtatatgtttattgcaatacttttcacacacaatagcaaagtcacagaatcaacctaagtgtccatcaatggatgattgaattttaacatgtggtatgcatataccatggaatactatgcagccataataaaaagaaggaaatcatgttttttgcagcaacatggatggaactggaggccactatgctaagtgaaatgactcagaaacagaaagtcaaaaactgcattttctcgtttataagtgggagctaaacaatgggtacacatagacacacaaagtggaataatagacactgcagactccaaaaggagagaggtgggaggggagtgagggatgaaataccacctatggggtacgatgtacactatttgggtgatgggttcactagaagcccagacttcaccactatacaatatatccatgtaatacaactgcacttgtaccccctaaatctaaaaaaagataaataaaaaataaaaatagccaacattttgtagaacattctcaggtatctgacagtatgccaggcactttaaatttattatcttgtttattccttgtaacaacactaagaaatacgctctattaccaacttattttacatgtaaggtaaagaacattcaaagggatacactttttcaaagacacaaaattattatgtggcagagacaatatctgaatcaaatatctgcttgatttttgtgtttaagccaataaaatttatataaaatttcaataattgtgttcaggccatttaaatgcaatcagccaattatttcagtggtgatttattcaatccaagctacacaccacatcacattttgtaaataaatgtgaaaggtctttgttacctagcacgtggaagttttttattctgggcctcatcaagctggtccaaaatggttctgtacatccagctagaaatatccagaaatgcttgacaccagtcgcctagcctttctcacaaagaagctttggcctggccaataagagccacctttggcacttgtcttaagcttctcttcaaaagctctctaggtacatgtatttttaaagtaatagttttgggggaaagaaagaatttttttccaaaagccatcctcctaaaataatagattaacttaaaactaaaaacttatcacacttacgagagaagagtgggtgggggcatctaaaagatgggctgagacactgagttatgaatttatattttaaaagattgagaaagtttttctttgatttgtatttttatctgagctaattgatgctttggaaaactcagagtatttcaaagagccagcttttttatgtccaggcaaatcctctcatgttactttccagatctctcaaccacatctctccagctctcacaagacattaatatgtaatctctaccaagcaaaggatccagtcatatcgtgagtcacagcaccatagtaacacaactacttaatggataggaggattgatctccctcctcccatcttcccaatggctgcacttgggaatttactatttctacaaatcaaagaaaagtatttgtgaatcatgtggtgttctcagtgtgcattcgattctgagagaaagaaaagcattctcccctcccatgataatcatcaataatctcaaactacagagggcaggatctatagaagacgaacatccataagaaaaagacgaatgcttcagcctcagcaatccagatcattcttgcacagatgctttgtaggaagctcaagtttcagtgtggcctcagaaacactgcagacgtccctccccatcctccttcttcttgcagaggggaggagtgaggacagaatcaccccagcttgtctaggaaagaaagacctcaccaaatcggttagggaactctggagagatcagccctgtaagccttaatattgtcatccaaccatggggtgctcatgagattaaaaataaggcaggactatgacatctaatttatagattcaaaaactccagtagcatattaattaaacatcacattttatagcctccatgctaagcattttgttcacatcctctcctgagctctctaaccaaggttctaaactgccatcagcctgtcattgatccaacacctccatcccaactttagcctcttctgaaaagaatcctacctattaagcagaattctcaaagtacaagtgtgtcaacttctcctaggaatgagtgcatcagtagactaaaagaattaaacttatcatggggtgatagtgtgtttatcagcttcaatggagcaaggaaatgcagtcttttaatgtttgcatttggaccctagcacttggcatgcttttttcctgaaatccattccttctgacttccctcatgagattcctggtcactggaaagtcacactccccactgctgtctggtccttaagaagatctgtttttccataaatagccacagagaagggaacaacacaatttaacaatcagttgctccctgcactttctccaggagccaaaaataaataagtaccttaatctggtttgttaaattaagcaaagaaatatactcaagcctttctccatctagctcagcttatgctttcccctaagtatttgcttttcacttacttcagtgttttcagaagcccacatagaaaaaccacccaaaaatttctacaaaaggaaatagctgtaatagagaaaaaatttttcctgagatttcagaaatccaagtttaacctctttgatgttccacacacaatgttcagtagttgatcacaacccctttttttcctattatatatagttttaataccctgagaaataaaagtgctgaactctctctgatattttactgaactcctgaactattctgagttaagtatgacagatgccctaatgctcgagctagggaagttgttcttttagttcaggcatggaacatttccattaaaaaccagagacctcagttgtaaccttggcaatgctttctccacatgattaattattcttatgtgcactgcagtccattagggaagtgtcagtgtgccttaggatgcagacaccttcacatggattattttgcttactttgtcctcccctatgtcttcatccagcaaaataatcacatcgtctgtacttttatttcaaatattttttaaagatttttatgacctttactttttaaactgtgtttctattcagaacttttatcttgaagaattctatgtttgcattactgaacttgttgaggtataaaaagttataatttaaaaatgaaatagtaaaatgtgggacaatcatttagagataattcagaacaaataagtatcatgtaggttttgtcatttgaggatcattgtgactcttctatttatacatttgtatgtttatgtatttctccatttatgttttgattcttatagacacatgatatgctttgtatatacccatgggtcattaaactgtattttccagaacttttgcctatttggttccagggtttctatttatacttcagaaatatataattgaggtgaaccccaggggaagaggacaattggtgatctcttcacaaatagatgtgagagtaaaatttttactgtacatttcataggatagttacaaaaaggtaagcatttaagtaggggaatattaatagttttataatcgagttagtgaacaaactcactgcatttcctaatctagttctcattttggaaggcaaaaactgcatctctagccagcagagaaatatacaaaaatacactttttaaaaacttttatgttgctccttgaaattcctttacagtgatgactctcaataatttgattttccagccaaaactgtgtacaaggtataaagtctatagacatttgtactatcttctctttattttggttaatatatctaatttcttctaaaattatttaaaatgcttgtttttaaaaagttaagttttgaagtagttagattaattatggctcctacttattcatagttctttgatgagagaggaaagggaaaaagaaggaaaaaggaggaagaggagcaacacataattatttatgaagaatgattatatacaaggcactgtgctaggtgctttctacaaattatctctagtgctcccgtcaaccctgtcacttgtctcatttttcatttaaggaaatagtgacttgggaaagttaacatatatgtcagaagtcacagagctgctaagtggcagagttgaaatgatctctgcccacattctggttcaatcccacatggaggatattagtggctcttgctacagcagctgtcaagaaggtcactcagagcttcacagaagcctcccaactctatactcgaaaaaaggcatcagccgtccactccctaagaagttaatattagaacttaattactctggcttaaagccttgatagaaatcataattcaaacattctaagaatagggaaaagagtggggacctctaatgaaggcctattatacaccaggtgcaggacgtatcttctcattcccttccctcactcctctaatccaggtgcatttgagccttccaccaccataatactctggtggtgtgaatgaacagtctgagacagcctctggtgaaaagatagataatattaagaatgataatgaaaattaacatttacacaattgttgctactaatttttatggatcatttggaggaaaatagcaaaaggtttaaaaataaactaccataggtcaaacactaaccaaattaaggagctctttaaactctttattttctgtatttcctctcaaattctgtctatgaacatatatatatatatatatatatatatatatatatataaacatttatttgttgagtatggaaaaagcataataacaatatgaataccctactcctagcccagcaaaccatctcccaactccaagaatgtttttaaaatatttaaatcctgttcaagcaatgttttctgtgtgtcccaacaagttaagctctgtgttaaaagttctgtagaatatgtctaaaacacactggaaatgtagtgagaatctaaataatattcagatatgaatatcttatcttattcatatgaataagacatgaatatctttttttttttttttttttttttttttttgagacggaatctcgctctgtcgcccagactggagtgcagtgccgcgatcttggctcaatgcaagctccgcctcccaggttcacgccattctcctgcctcagcctcccgagtagctgggactacaggcgcctgcaaccacgcccagctaattttttgtatttttagtagagacggggatttttaatagagacggggtttcactgtgttagccaggatggtctcgatttcctgatctcgtgatccgcccgcctcggcctcccaaagtgctgggattacaggcgtgagccaccgcacccggcttgaatatcttatcttattcatatctgaataagacagtaaaacttagactaagattaaaagaagttcaaaataaggaagctcgagtttccaatgtttgactgcaatgtttacaaactttttttcagtgtaactcagaaattcttgtgatttgagtcatttgatccataccccatctcctaaaagccagattgcacctcctatgcatggaggtttctcaaaaaattaaaaatagaactaccatacgatccagcaatcccacttttggggatatatctaaagaaattgaaatcgttatcttgaagagttatctgcactcttacgtttattgcagcatttctcacaatagccaagatgtaaaaacaacttaagtgttgatggataaatggagaaagaaaatgtagtatatatattggtggactgttattcagccctgacaaaagaaggaagtcctgctatttgtcatgacatggataaacctggaggccattgtgctaaatgaaatgagccaggcacagaaagacaaacactacatgatctcattcacatgtggaatctgaagaagtcaaactcagaaacagagaataaagaggtggttgccagggagtggggcagagtgagaaatggggtgcagggattggtcaaaagttacaaaatttcacttataagatgaataagttctagagatttaatgtacaacatggtaactacagttaataataatgtattgtatacttcaaattgctaataaattagatcttaaacattctcatcacaaaataattatatgaaatgatggatatgttaaatttatagtaatcacttcacaatgtatatgtatatcaaagcatcatattgtacaccataaatatttttatgtgtcaaaaactaacaacataaaaataataacaagaacaacaactacaaaaacaaaaacacacaaaatgaatagagtttaaggtgtgtgtccaggatgactaaaaataaagctgtaaagataagtcatgatgatattgtgaaggacctgatttgcagttctaaagagttcaagctttatcctggaggcacagctagccaaaaattaaaatttaaaagtttttaaatcggaaaatgacatggccacattaaatctttgaagagaaaactctggtggtagaagaaaacacattggcgtggaatgtcaatgacagcagaaagaccacttgggaggctgaagcaatagtccaagctaaagatggttcagctctaggccactgcagggtggaaaaggcagaacagtttcaggagatatttagaagaagattttttttaatggatcagaggtagaagctgagagggcaaaaggagtagagaataatttttgtgttacagagatacgtgaatcaagaggagggccaggtttgagaagaaagacaaggaattcagtacatggtgtttgatttggctggagaatgtagagttgtacaggaggttgtgcagtaggcaattggaagtaagaatctgggctcaaggtaaaggtatgctgaataactaacttagtccacctttccctgaaaaaaaaatcccagctattcaaatagtcctttgaaaatcaggagctgattcttcttctcttctatcaccctgtgttcacatcccactctcttccaaagatttgcttactctgtatattagaggataattggtgtgagaacatttttatgaatattgtacagtagcggcagactgggcattttaaacatctttgtaatttcaatattgtatgagaggaatgactatctttcaatactccatgtgtaaataactctattcatttaaaagatatgtttctgagtgactgttatacacaagtcactgtgttaggcagtaggaatataatagtaagcaaaaatgtcaatgcagttcaaataactctccaggcagtggaaggagacagccctgactcaaataaccacacagatgagatttggtgccctgagaggaataatacagttcacagtgctatgagcacacagaagaaaataaactgtcctaaagaagacttctttctagtcttctaagaggatatcataagataatgttagagaagtggccaggagttgtagatcttataaaagttattttttaagccaagagtaataggaagccagtgaagggtttgagcagtgagatgacataatccgatttgcattttaggaaatagtctgttgaaaatacaaagaacagattgcctctctgtttgccatggttagaaagttaccctgtgctgctctttgtccaaatgtaatttcatttttgcagaatgcctggaaccagggttggatcaagttagggcaaacccgaaaatgacttgcatgaactcttgtatgttcatataagagtcaggctggcatcctcctggtattggagacagctttgtgagagttgttcaagtgacagtggtggaagggttgaccacttagaaatccgtgcttaatggagagtgtgcattattaacaaataatgatgtcaaacaactatacatttccataggcaaagaaaaacatgttgatacaatgaaattcacatctctagattctacattagagcatgtggacatgtactctaaaattaatttcatttgccttttatttttaatctaccacttaaaattggactcattatatgtggaactgcacacacactcaaatttacttctatttattagctagtataaatacattgaaatttgtctttgggctcttaaaaatcttgaaaaggtatactgttttctttccatataaaccaggtatgcaaatgattgtcagacaggattgttggtaattttttttaggatctcaaatccataagggatacgtagcttatttaagctttattgtattaaactgtagaatacaccataaaatactgatagcacaacttgcatcaaacaagtaaacatttgttatggggacagtaaaatttacttttcacaaaaggagcctacagtaataatgcattcaattctatttcccagaatgcttcttaagtatgttaataaagtctttattgtgtctgcttgtaaaagtcgccaccatttcccattagaaagtctctgtttattcatcaaacatttactgacagtgactgctgggagcagcctcagatttccactccattacacatttgtggcataaagcacattaattatagatatattacaatattcaactcattgaggaaaaattagatgatcaaggctcattttccttgacaataagcaagttaatgaaaatactaattacctgatgatgaagtggagccttcaggattgaatgcttagcatctgtaaaagagttctgcgaatctagcacagaatattaaagccagaagcatcggaagcctatgagatggcccttgcaattgtccagtgccctttattcagagagaaaatggtattcagaggtgaggcagagttttataaaccatttgggggaagtcattgaaaagttggactctacctgaaattttcaatcaaaagttgcactctttacctaaaatttttaattaatattatctggaacacaaatcaacttcattgtaaataattatacaaagaataggctcttgtcaataaggacattgccatctactatttattttgtaataatgccagaactattttcagccattttaaaattgtaagagagaaaaagacatttatttaaaaatttccttctttcaatttctagaagtttagactgaataaactcccagcatagaaagtgaattcataccaggtaagggtgttatggattcttaaaaataggccctttccaaatgagcatatgaaaaagtacttaatatcatatgttattagggaaatgtgaattaaaaccataatgtgttgcctctacacaccttttagaatggcaattaaaaaaaaactgacaatatcaattgctggctaggatgtgagacaacaagaactttcattcattactgatggggaaataaaatggcacattcactttggaagatagtccggcagtttcttataacattaaacatagtcttaatgtataatccagcaatcatgctcctcggtaaatacccaactgatctgaaaacttatgtttacatagaaacctacacataaatgtttatattagcttttttataatcacccaaaactaaaagcaacaaagatgtctttttaaatagatgaataagttaaaaaaaaactgtggtatgtccatataatggaatactatttggcaaaaataaagtaataagctatcaagccacataaaggtatatatgaatataatatgcatattactaactaaaacaagacagtctgaaagagctacacactgtatggttccaattacatcacattctaaaaaaggcaaaactatagagatggtaaagccatcaacggttgccagggaatgggggacagtgaggattgaataggttaaactattcagccagtaaggcagtaaactattctgtatggtattgtaatgattaactcatgacactatgcatttgtcaaaacccacagaacttttcagcactaagaatgccttaattgtgcaacttaaaaaaaaatcatttaggagactggggatgccaggataaaatgcagaatgtgataaaagaatctaaatgtataccaatgtatgaaataactgaactgaaggtaatggtagacagaagctgctaacttaagtaactttggaaatgattagtgtccataagactaaaggcaaaaaacatcatacatgagcaccgtattctagttgataaagttgctccccacaagaggtaaatgatggatagtgggagccaaactgtcactgttggaatggaagtttacagataagcaaggagaagaagctaaaatgatccatatggtaattaattagagcaggtacatcaattatagtaggtacatatgcttagcttaaatattgatacatatagttccatatatataccacacaaaattgtgtgtgtatatatatatatgtatattatatatttataaaaccaaaaccacaatgatgggggtatgtgaaagaaacataggagtcaattgaaagaactcccaatgaccaaagctggaacaatttgagcaaaaaatataaggtagtattggattgtaacccagagtataaaataatgatctatgagtccacaataaatacataaaaaataaccaatctcccaggcagaaatgcagtgctccagtattgcgccactgtactccaacctgggcaacagagtgagacactgtctcaaaacaaaaaaatcaaaacaaaaaatcaaaacaacaacaacaacaaaattactgaaacaaagcaaaacaaaaatcccaaataatgtatgtagctactccaccctcaaggaaatggcccataactgcacataaagatttccttctgaagagtatagtatggaaagaagagaaaagagtaactttacagtaaaggaatctgacaaacattctctcagccagaagacccaggttaacatcagtagtaataagtcatattgataatatgtactcttgatctatgatgacagaactttacctgtagtcttcctttctgtcactttacctctgtggtcttcattccaaaaacacaagactccagtctaatcatgaaaaatcccaattcagagacattctaccaaatatatgtccagtggtcctcaaaactgtcaaggtcatcagaaacaaggaaaatctgaaaagcttccacacccaagaggagcctaagaagaaatgacaattaatgtaatgtgctgtcctggagggaatcctggatcagacaaatgacattaggtaaaaactaaggaaattagaataaaatggggatgttagttaataacaatgtatcaatattggcttattgattgtgacaaatataccataataatgtagactgttgataatgggggagattggtgtggggtgtaaggtaactctatgtagtatagttgcaatttttctgtacatctaaaagtcttctgaaataaaagatttttaaatataagccctttccatgcatgcctaaattatttctcccatttctcaaactggcagtctaaattagaataagcaaactgctgagtatatcttctgatttcattccagcatcaatttgtatttcccatgctcttttgaattcaactaatagctctgcacagcctctcccttttcctgtgcattatccattgaatgaattccaaatgactctgctgtggaatggccaaagaccccatttgatggatggtcattttacacacctgttttttgggtctttgattaatgtgctggcatacatcttatataacttctcctaatagggaagtgaggaaaacatacatttgtacaagctgcagtccagtgtgctcctcatccaaaaggcttaatttagaaatagttacttaataattcaacatggacaattccttgattcccattgactttcaattcaatcagtaaagctgcctcttggattttccattattatgaagactgatgtattttataagagcaaacagctgctctggcagattaatgttccttgttgtcaccctgcagtgaaagcttacttggaattcttttcttgtgaaaagcagtttggagccaaagaatttaatcggctgaccaccaatgacgttaacatggtcctctgcccctgggttggttcttataacccttgcccaccaaagtacaacaagatcttcagatagatggctctcctgaattaaaggccacatatagtgagatgcccgaggacttggagttgagagaactgggctctctcatttcagacttctcatttactctggacaagtcacttaacctctgcaggctttagtttccctcccttcaatgggaacaataatacttgcctggattttctcatagacataggcaaggatcatggatttattcaacaaatatttctggagtacctactatgttgaggtcaatgtggaaaaccctgaggatgtaacaggcaaagaaaaaaaactgttgatcttgtggaacttgcatccagtacaaagacacagagagtaaaaactaaaatacatggtactttgatggttataagtaaaataaaaaaactaggcagagagatggaactctttgggaggaggagaggtcatttgtttgcttgttttgtttttagtttgtttgtttgttttgagatgaagtctcgctcttgtcccccaggctggagtgcaatagtgcaatcttggatcactgaaacctctgcctcccaggttcaagcaattctcctgcctcagcctcccaagtagctgggattacaggcaagcgccatcatgcctggctaatttttgtatttttagtagagatggggtttcaccacgttggccaggctggtctcaaactcctgacctcaggtgatcctcccacctcagcctcccaaagtgctgggattacagggatgagccaccatgtctggccttttttctttttttttttttgagacagagttttgctcttgttgccagggctggagtgcaatggcacaacctctgctcactgcaaactctgcctcccgggttcaagtgattctgttgtctcagcctcccaagtagctgggattacaggtgcccactactacgcccggctaagttttgttttgttttgttttgttttgttttgttttgttgttgttgttgtttttgtagagacggagtttcaccatgttggccaggctggtctcaaactcctggcctcaagtgatccacccgcctcagcttcccaaagtgctgggattacaagcatcagccaccacacctggctgaggagaggtcattttaaatatggtgatcaaaataggcctcactgagaagtgacatttgagcaaagacctgaaggagatgagggagccagccatgaggctgtctgagaaaaggacattttgagaaaaggaaacagcaagtgaagagtaggctgggatgttcaaagaatggtaagaaaggcctgtgtggctggaacagaggaagctgtgtgaagaatagtaagagatgaggttagatagctaatggagaggacagtccaattaggtagagccttgttcgccattgtcaggactcttggattctacttggggtgagatggggagccactgaagatggggagccattttgaacaggacagtgacatcatcagttctatgctttaacaagatccttgtaggtaggaaatagatgatgggcaaaagtaaagcagtgaggttgaaaagcaactagattctagctataattgaagatatagtcaatcaaattttctgaaagattagatgtaagatatgagagaaaaagaggcatctctttccaaaattcttgtcttgaacaattgaaaagacaaagttgccttaactggcacaggtaatacagtgtgagaaagaattttgggggacagggaagagcagaagctcagtttgggaaacactatgtttaacgtgcctgttacatatccagatgaagattagaagaagataactagacatatgggtccagagtttggaggagaagttcaaacgggagatagaaaatgtgtaagtcatcagttgatagatggtatttaaagcaatgagatgtattggtcaccaagtgagccaggatcttaggaaaacagaagagctgctccaaggattcagcttttagagattccaatgttaaaaagtcaaaagaggacatgcgcggtggctcacgcctgtaatcccagcactttggcaggctgaggcgggcagatcacctgaggtcaggagctcaagaccagtctggccaacatggcaaaaccccatcgttactaaaaatacaaaaattagccaggcgtggtggcacgggcctcctagatactcaggaggctgaggcaggagaatcacttgaacccgggaggtggaggttacagtgagctgaggttgtgccacagcactccagcctgggcaacagaataagactctgtctcaaaaaaaaaaaaaaaaaaaagaaaagaaaaaagaaaaagaaaaaaagtcaaaagctagagaggaatcagcagagaccactgatcagaggcaacggttgagaatggagccaaaggagagtgtagtggtagtgacccagaatctaagagaagtgtggtaaggaggagggagttcccaaccacatgaaaagttgttggtaggtcaaatgagataagatctgagaactgacctttggatttagtaatgtggagaaattgtgaccttgtttggaggcaagaaagaatataattgcagtgggctcacgagtaaatgaaagttcatagttttgatgattgtgttacagttgcgtaaaatgttaacattaaggaaagctaagtaaatggcatatgggaattctctgtatattttcgcaacttttctctaaatctaaaattggttcagaatgaaaaagtggaaaaagtatataggaagaaagcaggtggagacagtgctgtaggcaaatttttcatgaagttttcttaaagaggtaagaaaaaatggatgacagcttgagaaaattgggtcaaagaaaggcttttatttgtttggcttagtcttttttgtttgtttatcttaagctaaggacaacatcatgtttgtatgcctattggaatcatctggtagaaagataaaaaagtgatgatgcaagaaagagatgaatatcactgaagcaatgtccttgaatagagcagatgcaacctagagttcctgtggggatgctggccatagccatgagggcagatggaagggtacagatgccatatgcaagtagatgtgcaaatcctgtctgattgtttcacgtttctcaccaaagggggaagcaagttcacacatgagagtagggatggtggaagaaatgcaagagtgttcaagttttaaagggagaggaaaaggagcgaaatagtcacctctagagagagggagaaccagtgacagcattcgagatactagaaaatgattagcatccatataagaaggaaacactgggacctgggtgtgcaggggtgaactggttgatattccactctcctgtcttctgatcattatcaatagcggtaatttgaattgagagacaggccatgccaaggaaagttcttgaggcaatggcaaagcccaccttaagacattataaaaatcgtcacacacccgatattgaacaactttcctctcaactgctaagaggcagaattaagataatatcatgcattcctctgttggaactgaccaagttacacctcacagataacatgcatttaatcgtatatgcttataaatatataggtttttaaagcagtgacttaattcatcaatagaaaatccaaaaagagagtccaaaaagaaattgaataagttctatcttcagcaaaccaagttctgccctgtgatattaagtgtccctgccaatttcagaggaagaatatgtttccccaactaccagctttatctcagaagtagggttggaaaagagaagcatcccaggagaattgtctctctctgctcagcagtacaggggaagactcctaattgagtgacatttcaaccaagagtcaagggaaattgttaccgcctaccaaataaagcttcttgttctgcaagctggttccctgatccttggggaacagaggagaaatgtttgtcttaagttccctgagctagtggctacatttgtctccgcagaagagaacagatgaataaccaagaataaaacatcccaagatgagatggagaacgtaaacaactatttttgcagggcatggtggctcacatctgtattatcagcactttgagaggtcaagtcaggaggattgcttgagaataggactttgagaccagtctcggcaacatagcaagaccctgtctctataaaaaacttaaaaattagctggggcttgtggcaggtgccggaagtcccagttacttgtgaggctgaggcaggagaatcccttgagcccagtagctcaaggcgacagtgaggtatggtcctactgctgcactctagcctgggtgacatagagaaaccacgtctcttaaaatatatatatatataatatactttggactaaacacacctgtttgtggaggaaaaaggaagtttgaagttttatggagctctcagagggaatcaaatttccagataattgcaaattgttcatgtcaatgccactgaagtaacacgttttcctcagaaatcctgattaaactgggtgaattttctaccccagagattactttatctcccacccccactggcacataacagcctctaggagcctaggttctttctgcagacaacacaaaataattgtgtttctcacaagtgtgcttgtgaaaagggaaccctttttttttttttggttgtttaacttctaattcctatcaaattctatcagggctggtggctggccctagatatttgctaatgtcctggttttgacctaagcatttttgtataattttatcccttaagcatggtgtgttgtggttaagttaaaaaaaaaacactttgaaactattagaaagaaattacagagctggaatctcaagtaccatcccaactgttacaaggagctagctggccaggaagccgtaatgcccccattaataaagctattaattttgaaaagctttgacagctataacatcttttttaagaaagcaaaaatacttttcctttatcttaaaaatgccttcttctttgtatggagcagctgcctcaagcccccttccactgcctgttttaatttgtctttaatatcagatgtgccttatcgatttcttctgtgtatattttcattctgaataattcagaggcaagattttttttcccattatggtcaatagcaggggcaaattttgaggataatcaattgagccctgactgacgattcctgctgttggtaaccccagaagtgaagaagggggaacagcaggggataatacgatccaacagtcaatcacagctatcagcaaaggagccaatgcgggtttgtgtgaggaatagagatccatactgcaggcccaaaaggcttgctaatagtgtgctctttttacttttcaatcaacggcactccagctgtgctggggagagttatggtccattctcatatacattttcctttctactaatgtttaaaagccatgttttaaaggggtcatcttttgtgtgaatatgtacatcttctatgcatcaattcttaatgatttgttcacattttagccaagctcttttcaaaatagggtagaaaatttggaaagcttccaggaaatcagtacagggaataaataattgtcacttttaaattcagataatatggttgaaaattaattatcatagggctgacagaaataatacaagtttgcctagtctcccctcacctgcagtaggaacacattttctgtgcctgttttgacactggcccttgtccaagtctttgacacactcaatttactacaaaattggcaaccctctgtctcctaaaggtatccaagtgtaacaataaatattggtctccatacacactatgattaacataagtcagagtagacttaatcagtatcaaattatttggcttccataattttagtattttatattttcatctctttcttaagatatttttataaaatcctgatttaacaagatgtgctagaggcagccgggtttttgcattctcttagggatgtggagatcggacccaagtgaggaaaagggacgctcaggttaacacaagcagttcaatttcaattatgtggagtaaatggtctttttcaggtctgatgatttttgaaaactatttgaaggtctgctgtgatttacatgcagtttgccttgatctgctaaaagaagggctttcatattacttgactcaagtatttgaatgtaattatgaaatatctccttgccataaacagatattcctaaggaaatatttaacaaccaaccaaacaatccctaaagaattgtcggatataaaataaaggctatagaattaatatcttctacaaaagttacctggttttcttatctccagaggagattcataaaattgcaaaaacatctctagttaattcctaaatagcttatagttaaataatagcacaatgtatgcaaagtaaaagaggaaattagaagtcctggtttagtttaccatagataacttatttataaatctctgtaatttattattaatatccttatacaataatcgctcatgcatataaacacagttaaccttaaaaaattttttctgattcctctttctttacaaaaaagatattttggctgtagaactcattagttttaaaggtttttgaagacattttaaaagtacgctaccatttagtttatgggggaaaatagtgattctttgttcatgaccttattttattcatcaataaatttcatggaggaaaaaattactcttattaaaaagtatggttttcttggtattaattttggagttaaggcttatatctcagaaaaagtaaataatacattatttgtaaagttagggtttattttgtaaatatcaacagtgctttcatactacaaattataatatcagtactcatatgctccaattgtggtctttgacacaggtcatctgactttttcttgttcttgaagggtaaaatacaatttggaggtgacaaactcttagagaattaagtggtggattgagctgacatgttgccttaaaatgaagaataaaacgaacaaactgatgtttttttttttttttggtaaatggttggtaacatacatagcagcaagcatttgctagcattgattattgattaaatgctgatctttagctaaaatatgtcatcaatagaaaactggcaaacagcctcttctaaagccacaactagagatatttaacactgccaaaattagtaatacaatgctttcagctggtttttcctggtcagctataaatgttaacaggctgatattaaaagttgatatcaatgttgatatcaaaagtatagatctgccttatgttaaaataaaaaggaaaaagaattagtctcagtaagaagatctgggttctagtgccatgttaggagtgctacaaacttgctgtataattttaattggactaatatataacaacattagtaggagttttgtttgaaccagagatcacctcacctatgaagtaggtatcactattatttccattttgcagatgaggaattcagggcatatggaggtaaataatttgcctgaagtcatacatttagtaagtggtagagtcaagggcaccaaaactcagatctcgccaactcttaactaccatgaacaggtgttgtctctacaaatgttgaggggaaatcaagtggtcacgctatacttttaaaatctctcattcctccattttatatgcattctcaagcaaaggattccctgattgattgatggatggatcgattgattgattttttctttccttccttcctttcctttcctctcccttcctttcctttcctttctttctttctttctttctttctttctttctttctttctttctttctttctttctttctttcttctttctctctttctctctttctttttctttctttctttctttctttctttcttctttctctctttctttctttcttacttctttctctttctctctctttctttctttctttttttctgaaagagacttacagtttcccatatgcttcctgtcactatggggagggaaagagcagagatccttcttaagaaagtcactgaaatgaggaaggggcaccatggccagctcactgccctcccctcaagaatcttggcaaatcaagagagagggtcttggcagcagctgatgataatgatcttaccatagctcgaacatcctacctcaaccttgccaaggagatgcaggactgtgacaagaaaaaacagcatatgcaaataaatagctggaggacatgctttctttccagcattgtccttgggtcaagataactcatagcccaggcaggctttaggcattgtgagagtcaataaatgataataccctatataatgcacttctgttcaaagcaacttcatttcttcaataattaacagggagagctcaggagacctaatagcttgatctcaggcagaattgtaaggtcaggaaatatatatggtgggacaagcataagtttgggtcaaaccttttttccatatccatatcttaggtaatttatataagttctttgagctctggttttctcacctagaaataaagtgtaacaaaatctgtctcatgggtacatcattaaaatgtatatcaacatagggtggtcatgagaaatcagcaaaataatgggtatacagtccctgttacaaagcaggagtttaatcagttatcacattttgtattatcgtgacagacagatgtttctgttactgtatcatcaaaggaagataccaccttgaaaattcactccaaagttgaacatcccttacagagcaggaagctagtaccaaagatcctggattgagaaatgtcaggaaaagggaaagatgagatcaagattcccatcaggtgccttaattttctattcatttgtccgagctagacctggaagcccaagctcagtctaaactgcactaaaggagagcacggtaccatggtcatgtgccctggcccctgtcttaagggccccatggacctatctccatatgcccaataggatacatttgtgtctgtatatttcagtttatagtcctttagtagcctagaaatatattgaagcattatggataaaatttcaacaaagtaaatgacagatttttatatgtgcattcaagaaagaaaaatatgtctctcatgcaggccataattgtagaacttatgctaatggaaatcattgtaacgctttattcatgagggtcatttataaatgatgtatgaatgtccataaatgtctctcttatttgctattaatagttaggaatgctattatttttacataagccaagtgtgattcctttcaagtggaaacaacaataggtataatgtgttggaatgagtctacaaataaaataagcatatttttgcctggttattaactacaataaagtatttccacatgggttatttaaggttttatttagatttcatctttaatttgggaaagcctcagggtgctgttttcaatgaaatgtatcaatcataacacttggaacccaattattacacttcagctaaattacttactgtgatcttaccagttaaagtacacttcaaaaccacaagtgagttgtcataaaaatattttctttttctcagactcttttttttattattactaataatattctttaatcaaatttgtttaagggcaaggcaccatctcatgttgacattacctggcacagtgaggagaatataaaacccacagttactggtcttttggtttggcctttccagaaaaggatcaaacaggacagagtcaaatcctaacttgccctcttccctacatagaggaaggatgggctgcgagtagaagtggatgttcttgaaagatctgttggaagttggcatatcttataaaatgctccattgatagaatgtcataaaatggtttgtttctgtttaagaagaaaaggtaaatgctctccagggtgatttatctaaacatggttcagtcagcattttgcacagagtcattcacaggtagcattagcagcattcattctacttttctaatttagtgcacccaacaaatgtggaagtgcaggcttgggagggtcaggggctacagccagtctttggaaattggcagatgagtctcaaagggagggaagaaccacctaaatcctagctcaggattaaactgtaccatgccacacgaggtgggagagtagagagacaggaaaggagaaagagcatgacttcctcctttttctacttgtcctagcttctttgacaatttattctgtccctctgttcaaaaggctggacttcaggtgggtccagagaagaggcttccctgccctgcagatcatcgccaagctgaaatttcctttaacttaagcctttgatgtctacttttaaatgcacagtgctacaaaaaacagacacagatgtttatagcagctttattcataatcgccaaaacatgtatgcaaccaaacttcagtagctgaatgaataaatacatccagacaatggaatattattcagcaataaaaacaaatgagctatcaaactatgaagacatagaggaactttaaatgcatattgccaagtgaaagaagccaatctgaaaaggctacacactgtgcgattccaactacatcacattgtggaaaaggtaaaactgtagagatagtaagaagatagttattgccaagggttaggagggagaaaggcataaataggttgagcccagaggattttcagagcagcaaaactttcttgtatgataccgtaatgataggtgcatgtcattatatatttgtccaaactcatagaatgtacaacaccaagagagaaccctaatggaaactacgcattctgggtgatgatgatgtcaatgcaggttcatcacttgtaacaactggaccgctctggtgaaggatgttaataatgggacaatctgtgcatatcgggggaggagtatattaaaaatctctataccttcctctcaattttgctgtgcacctaaaattgctcttaaataaataaagtctaaaacagctagaagagaagattttgaatgttccttacacaatgaaatgataaaaatgtgaggcgatggatatgtcaataacctagattaaccattatacattgtaggcttatgtcaaaaaatcaccggtaccccataaatataaataaataaataataaagtctatttcaagaactgcacagtgcctaagagggaaagcatgtttagtttcttctgggcaacacaggatggcaagcagcactttgtgagagctcagggggagagtggacactgctgtaggaggaaagatcccaggctcagaggccagcaggtagaagacaatctcagtcaaattcatatttttgccctgggccagatgtgtctaaaagcttcacgcttttgcacagctcctcccccaggagtagcaactgacggaggggtcacatgcttatttccccagtctcaccccctgggtaaacgtcagaagatctgctgatggacctttcaatttcacttccttcctttgcctcctgtggatgatggtttgcagggagggaggaattttaataacacatgaaactttcaattcctgtgaataaaacggggaaggcttgtcaactctgctcagggctgtcagagccatggggcagggcagacaagcgagattctggtttgaactttgtaccttattcctggatcaaagcttcatttctctggctatacctttggagtttaattaccataatacaaggccaggggaaaggaaactgtgctgcctacctgtcattctctaccttagggcactatacacagtgcctggcacatggtgggttcacagaaatattgactgaataaatagaggatggatggatgggtggataaatgcatagatgggtggatgaactcaatgtacctaagcattgttttatttaattctcacaatcctataaggcaagtgctattgtagccacatttcctccctcccttcaagccatcatgcacatgaggcaaaggataagagaaaaaaagatgaggcagtggaaactaatatgtatgagttaatatgcatacccagtatttttacttcaaaatccatttttttgtgaatgtgatgcttactgtactgccatttctcatacacgtcaggatatcacctcaggaaactggagtacgtaaaccctaatggaacaggctatgatcctagtagtattataagttgtgaagatagaaggtaaggaaatggtttacctctctgatcaccaaggagccatgcagaactcccagcaatagaaagagctgagcatcttggccagtcctcctgtgtcctagctttgatgtatgtggtgtaactaagaacagattaaagaaatatggtacctgtgttgtggatcatatgtttaacatctttggtttgttttccttgctcatgatgaagtctgtaatagacttaacctcatttaaatcactgtgtttgtggacagcacacaatcctcccttaccatagaagttactcagatatgtagaactctagtatctttagctggagaggaaacctgtgggagggaagggctgatggggaattagaaatagaattcctgagaaattggataacttaatctggagaaaaaaactgaaaatgcaaacaatggcacattgattctgtagaattaattgtaagaaagatatcatcaaattttttctccatttttctgtcagaatcagagtgtaaaagtaaactatagtgggaggaatgcatgtaattccatacctgtacccctttgccacctggaaaactacttttgtgccaagttcccgagttactagaatgatttaaatcaagctggtctctccaatcaatattttttctaaaggaagtgtgggatatagtggaaggagctcagaagttcacctggatctgacacagagaagaggaacactagctagctggcagactttagcaggatcagagccaatgttcaaaaaagaaggaaatagaacagggaaacaaagcccactgaattctattgagcagaatgacaataatggatgtcttgttatagacagaacccggctaagacctctaattccattgcctcatttagtcgttacaagaataattattggtaggtactattttttatctccatcttaacaatagtaaaagaagtctcaatcatgttgagcctcatcttttttctttcattctcaagaatataaaataaaaaataaattttaaaaaaaagaaagctccgaaaggttaagcaacttattcaagcttatacagtaggtggcaaagctgtaatccaaacccagaccattatgattccaatctctaatcttggttactaatatataaacccaaataactaacaagtcaatcaaccttattttttcctgatctccatttatattggaaagataaaagcaaacaataagataacagagatctaactttaaaacaaattaaaacacgtccacactgctctcagagcagtacaaagtcagctgtattattacctctatttcccatttattcagtcagtcaattgttccacagaaatttattacaaatttatgtttaggctgaacaaagatctgaataggcaagcttattatgtctgttatatctgttatattatatgcaatatatgtactgtatatgcctattgtacatttattataaatgggaaatttatacaaaatattttaaacacaatggtaaacagccagaaatacattttgaggagaggaggagttctgcttttctcacaggttaaatcaattaaccactctcttaacattacagctttttgaggttttactgtagtgttttttgtgtacttatatcatttgctaataacaactaaggaaatgtccagctagttaccagggaagctcaactacctctaagcctatcattattagaattcaataatacgcaaatcaatatcaagattgaaaaaagaaaggaaggcccaaagtgttccttgaaaagacagcttctcatagaatgacggacaaccaggttttatttacttcgtagctaatttgaaaaatgcttttgagggttggaagatgtttgaggaaatacaactggctactagccaactacaatactgcttcccaaaagggtccacccatcagactagaataacggagctccttctgaggagtccagggaggaattactggaaatggcaaagtatattagacctaatattatcccacaacataacatgatgtattaacactctgcctgaattcaagatgtttattgatttcttaaatcttaactaggttacatttgcattatatagtacaaaagaaccattttaagttatttctgttcacatctcaggctgagtattttgcctaaaatatttcttctctgactgaatttatagagtgaactgagatgatacaagtaaccaaagttaatcataaaatatttacgtgcattaaatactgcatttattcatagtcagaggccaaaataatgtttaaatgggagcatgtctgatagtaatatcaaattgagataaatttgtgaacgatagtttgattgcatggaatctaataactaagttgaggtccagtgttatgtaaaagaaacaagaaaaacgttcggcctaaattttttttaaaaagtgagattgacaatttaaataagtgtgtactaatttcctgcagcatagcacttgctcagaggtcatgtatcctgcaagcccaactatccggaaagacaggactaggaaagacctctgcaccatcaaataaacatcaaagtttcatcaagttaggctgacctgggctcatattcaggcaccacattggaggtttatttcacataagtcacttcactaccttgagtatattttcaactgtaccctaatttacagggctgctgtcagaattagtgttaatagaagtgccttcaaagtgctgacacataataggctctccacggaaagtaattagcatagcgttatgggctaaattgtgtttccccaaaattcctatgttgaagccctaatctccagtacctgagaatgtaactgtatttggacactgggcctttaaaaaggtaattaaggtattataggttatatgggtgggatctaattaagtatgactcgtgccattataagaagaggaaattcaggctgggtgcggtgattcaggccgggcgcggtggctcaagcctgtaatcccagcactttgggaggctgaggcaggtggatgacctgaggtcaggagttcaagaccagcctgaccaatatgatgaaaccccatctctactaaaaaatacagaaattagctgggcgtggtggcaggcgcctgtaatcccggctattcgggaggctgagacaggataattgcttgaacccgggaagcggaggttgcagtgagccaagatcgcgccagtgcactccagcctgggcaacaagagcaaaactccgtctcaaaaaaaaaaaaaaaaaaaaaaaaaaaagaggaaattcagacacacgaatagacaccacagggacacatatacacagagagaccacccagaaaagaagcagcaagagggaaactatctgcaaaccaaggagagaggcttcaatagaaaccaaatctttgacacctcgatcttggacttccagcctccagagctgtgagaaaataaatttctgttgtttacaccacccagactaatggtgttttgttatggcaaccctggcaaactaacacgtatagcgattgccaccttcttcaaagtagcgttgtgtgagagaaggacgtctaacatttgagtgacactttgattgatgcaaattcctagactttaaggttttttatgcatttggcatttatacccacatctagtacagcgggcctggcacatagtacactctcattaagtatttgttgaacatattaatgagtgaatacatgaatgaatgaatgaatgaatgttaattagaggctctagtgccaggtatgctaccacagacaaattcacagaacaatgcctaagtgcttattatatgccaggcaccatgcagtaaacactgtaaaaacctaatgcaaaaatataactccttaggaatttgaaggtattttgaataaggaaaaatggtccatgtgaccccgtcattatctttgcaaacatgctgtgtaatcactggtctagagaggcagtggtgtgtatgagaaggagcactaggcttaaagccagaacacttgcctgctttcttgttctcccacataacagaggacatttagacatgctagcctcagtttcccgttttgtaaaaaacaggagtattgatgcctatctcacctctggcataaagccgtggtgaagataaaccagaaggtatgtgtgtgaaaatgatctatagactgttatgtgaattaaaggcaaccagttcctaatggtagccttgaatcattaagtaaatactagtttatattctgcacattatgttttaatatgaaagtaggcacataaaagatttttaaagcattctatctaaataggtgatctgcttaaaaacttcgggccacttaaaagtttttctggaaagttcacttatgtggaaggactcattctggatgattctggataaatgtagtcactcttccttttttttaagatggtatttctgatgataattatttgaaagctttttgctttgggcaggtttgacccttagattcatgatctttataagtattgtagtagtatcaatgaacatgttccagtgaaaaataaaatttattttattggatgatagtgatgcaggaaaaaagacatctgtgcaaacagcaatgtattttaagttgtcttagcggtttatttttaatatgtttatatttcacttatcaattctaaaagctgaaaacgaaaaacataaaactttattccatagacatacccacaacacatttagtcctgaattacacacaaccaatagaaagaaaaacaagaatcaagaaggggtgggggggaagaaagagcaaaatatagagaaataaactcaatatgtagcaaaaccctgaggtgtaacagtagaattcaattttttaaaatattggcaacctttaactttgtaataaatggtaacaaaaactttaatgaatgtttagatttctaattaaatgtttacaacacaaatcttctcaatatctccttttctttgttttcagtggagagaatacctagtttcatgttgtaaatgtatgtaaagttctattgcattgtttttatagaaacaataccttaatgctaatgcactgacagcataatcacatggtctattatgaaaccataacaaataactttaaaatctaagctgccttttcacaattgagggcataagcagtttttaaatatcttagtaataatatggataattggattactttttccagggtatttttgtgaagtaaacctgaaacaaaattgtaacccattcactctaattgagctgggaataataattggttttggttctatacttgtaacccatgtgtcatcatagactaagcttcttcattaataaagggatgcataaatccttgacttctaaaattaatgtgtgaatacagtcagatgattggatataattggtggagatacctacataacagtaggtgcattcagattaagaaaataaaaaaatgcattataaatgcaacgtaccactaatataatgttcctgagttggccccaaagcatcactacatagacctgtcttcagaccaggaggatgacataccattttgtaagtctaataaaacttgcgcccaacaaggaaaaaaaaaaaaatcttatgtattttctaggtgtcaacagtcttcagactgttttattctatgagaattttatttccttttgggataagctttgttcctgtccttctcaacatcaacatattagtcaacaatttcctatgccattatagatacattataaatactattgctacattaacaatagcttattttatcataagtgtgttatttgagtatcttaccttatttcctgtttaaattttttctaactcataaaaacatccaaacacaataacttgaaaaagataatacaatgaacacacatataccttccatttagattaaataattgttaatattttttcatattttctttgtgtggatatatgcataaatacattcttaaatatgccacaatattattatacctaataaaattgaaaaagtattacgcaatttttatgaaaaaaattattccataaatatagaatatcccacattctagatctaagtagttgttttctaactttaacttatacagaggtataagtctcttgtattttctaaactggaatttaggttagaggtttgattagatatagattaaatttctggccagaatagttcataaaagtgatactagatacttcaaatcttattatatagtagcaactaatgtcaggctgttattctaggtgttatgctatgattgaccatgtagttaaggtgatgaccacctggcccctcctttgtaaacataaaattttcccatttctattaggccatgaatatcctacccctcaacaacctttcacccaatggcttagcatccactgatcacatacacctgaatcaattattacattagggactataaagtgagaattttctgacattatcattcttcctacatttataagttagcatttttctctcaagaagaattttttggccgagcgcagtagctcatgcctgtaatttacccagcactttagaaggccaaggcaggtggatcatgaggtcaggagatcgagaccatcctggctaacacagtgaaaccctgtctctcctaaaaatacaaaaaaaaaaaaaaaaaaaaattagctgggcatggtggcaggcgcctgtagtcccagctactcaggaagcttaggcaggagaatggcattaacccgggaggtggagctttcagtgagccaagatcatgccactgcactccagtctgggtgacagagcaagattctgtctcaaaaaaaaaaaaaaaaaaaaagaatttttcttagcttttttccctttcccataattcaatattctttctttttatatttttttagttttgataatttgtctaatgtaaatattattcctattttataaatgaagaaactgagccacaaagaagttcagcaacttactcagcataactagtaagtgacagatatgaacatggaacttagatctctgactcttattcctatacagtggcaaatatatcacagttacctccattgatacgatgcatctgttcaaccccctcaataaccaaagattttttcctgaagtacttcagctgtggaactgtgaataagcctttccttagaaaattccaagaacagacatgtaaatatccccagtacaggctgtagggttcggattattataaatggaaaatggaagcaatagcagacaagaattgggatgatattcctcaccccacactcctgtaattaaaagtcacactgaaaatcttggaaacttttagaggagggaaaaatgaaatacaaactcatccagtttttggaccaaacccttgaaagcagcagttatacaatttccaggtaattcccttactggccttctcattttttgacaggggagaggtggcttttttcagcatgaagctaattttgttctattataatgaaatctacaaatgttggacatatttccacctggacaaccagtacagtctccatctatgcattttcttttgctccttttttctttttttgccttttcttatttctttatctgcaaaagatttactaataagagcatatgaggttatgtaagataaatagtaatcaaagtttccaaatagcaggctttttctactcctctttacttcaattccttttcttttttctcttttcctctttctcactctactttgatattccttcctgaaaagaagaaaaaatgtttggccacttattaaaaaaaaacttattttttattaacaagcatttaataccaagtgcctgtgattagacagatacagtaaaaaatcttagggacacaaagagtagtaaaaatttttctagaaagtggcagagaaagtatctgttataatgtcatgtcatgaatacaaaaataatggtatgtgcacagtgacttggggagctcagaggaagaactatcctcagcaacatgactcaaagggctttcgaaggtctctgcctcccataagcactgataagggatgagcagttgcttcatttcagtgtaacaggggaaaaaattatggctgtctgtttattttaattaaataagaatctaaaggggagattattttgaacatgagctaatctcaaagagtgagcctgtaggaaaaaacgttgcctgggtgatttgttagaaaatgagagcaaaaaccctgggaccctgaaaataatattcctgagcagaatttgcaaaatcacagcccagcacagcccacagtagcgcattcccagaattattctttcagccgtcagcaccacatttacctcccatccttcaggagcagggctgtttcagctcattttattagatgatctcagatccatatcaagccataattaaacaacagagccccaggatgagagaactccccctaggaaagatcccccaagaccctaagcccagctgtagaaagccatgttctaaagttcaactgaagctgcctcctgagtgaacttgctgcgtgaccttgagcaagtcatttaacatccccgtgtctcagtttcctcatttgtacaatggggaccaggctgctgaccttcctcccgggcccactttgagaaacagatcattagcaattataaagtactttgaaaatgtaaatgctgaattataattttaatcaacaagtcaaccttggtgctttccactcaatcactccctcttgggcaaacaaccaaaaccactggctgacccaggcactctgagcccagcattcaccccttgcacaaaacatggcttctctagagacccactgggagcccttcccttcccttgtcagcacgcagcaactgtctttcaaccactgatcaggaaactggaaccccaaatgtgaagagtattcaagttcatgcttaagatatctcaaccaacccaaggaaattctgatgaagaaaataacaggcccatgcccagtgatctgggaaccacatttcctctggatttgtgaaagtttctcagttggaaaattatgtgtatattaattaattttctagcaaatatttgctgaacacctaaaaagtacacactggaataaaactttacagctcagccagtaggaatcctacagcagtgagaccaatgttctatggcccagtgatccctgctagaagattaaaccacagtctaaagctaggcagtcatgttacaggccatccaatgcctaacaaagaccaagtggtagggaggaggggctgcgcaaacacacaagcacataagtcctcggtgggtgtctagctttgcttggccttcagatctctcaaagaagttagtgtcaaacattatctttgtaaacatgactttaaaacagataaagcagtcaatcaagccctggattcgattttaactggaccctccttgattcagaataataagcgtgccaattcctttaataataaatacactttgaactgaaaccagagatgcttcctttatcacttgttgagtaagttgggtcgtaaacctaagttcaaataagtgcaaagaaaatatcactaaaattaattgttttagacagagtaaaacatggactcttaaagtggttgtattttctttcacatttaatgtgagccatttaagagctaatacacctatcttagtcgttagacatttcaacacctattagtcataaatttggtatgattgcacctgtcaggaacttgcaaaataaagtcaatgtgtagaataggcactgggctaggaattagatagattcaggacccaagcagacactttctaactgtgactttggggatcacttaaattctctcagcttgcatttcttcctctacaaagtaagaataataataagtgtccttcttacatccagggtcattgtgaggcactaatgggatgacgtatgtgaaaatattctgtgaacaataaaccacgctccaagtttaagagataatggtgaggattacttctattaaatcttcatgggataggtgaatttggaatctcctcactgaatgaattttaaaaaaggtatacagatattagtatagtgcctgtgggtagtaataaatatgcattgattatcatgaagagaaagatatgaaaaagtgttttcctcagattctgtttttgattaaaaagatataactggctttagtatgcttttcacagctatcacatttatgatctttgcaattaacttctaaaatattcatatttaaatggcatgctataaaaataatggattcagaaaattaccatatgtggcaagagtaaagaaaaaaacaaaacatttctctccatcccaagaattttcagaagttacagaatcatagttaataaaattcagtgttctctcggacagtatatactcatgaatagaatattattttgaagataatttaactccctggtattaccaaagcctacagaatactgctacttgctatgattatatacatgacaaaatataataaatggatgtacaagcaggtgaaacgcaatgtagattgccaaaagggtcgtgaagtgtacaaatgttaacaatatttttggaagtattaatataaacaaattaatgtaaaaatactaaaataacatttaaatgaattatagatacattttataacaatgtaagtttagtcaacattgcactttctctgtaaaaaacttttttcacatttttctaaatacctttgaatatattcacctgccgtttattatttatttagaatataacaatttttgctctgtgcacagagaagatttaggataattttttatataattctatataaccagccttcacatacttgaagacaagtttggaagcaaatatgcactcaaaccagccgtccaagatggctaacttagaagacagggaagataaaaagtcattgatgaagtgaaaggaaagacagaatcaatattcctctctctctctttctctctctctctctctctctctctccccccccccaccccttccctcctcttcttgccccacccctgttctccgtctatctttaggaaagtgtgcaagagagaaccactaaggaggccacagtgttttattctaatctcagaaaggacatgccataactcttgctgtactctactcataaaagcaaggcactaggtcctgcccatactcaaagggagaacattacacagggtatgaacactaggaggcagaaatcattagggacccttttagagcctgcctaccatgaatagctttgcatatcagacttagattactcaggaaatgcaaagcaatgccaggtatatttattacatttgtgattggaatggagcaaaattaatatgatcagcataactgactctaccgtaaaatgcctttgatgaatctattttttccaaaataacccaatttagtcattttcaaattgttttgcatcaaacccctaaacactagagagtacctaagatgtgccaggcactgggcccagcactgacagaagaaaaaaaacagcctctgacttcaaggggcttttagttttgaactttgcaaattctttttaaattttgtagttatttgggctttgttttgtttaaacaaggaacaattgctccactaaataaatatggacttacatgtgactttacaaagagctgcaagacactcaattatcaatacttcactaaacgttagacctcctagataaatagacgaagactgattttggttatactaataagtaaaagaattagactgcctgtcctaaaccacaaggtaagactatatatatataggaatatattttacctgagtgtctatccagtttcctaatcactaggtattaccacatttctctgagctcaacaagccagccagtatagaattatcatcaatttcacaaacctacttatatagttcattctatctctttatcctctttatcccttgattttctataattgcaaaagtcttcacactctgcaactctgttagcattaactcattcagcttttctctgcccttgttgttgccttaaagcatttaactgtaacaccacataattgttttacacctcctctttttcattccataggatcatgtttcaccataaatctttgagaccactttcaaaaagccatatcagatgtatttttgctctttggaagtcttgttctttaagggacttgtaatcagttcagttcagctttaagtttctcttagttgacaacagcctaaaggaccatgtttccattctaaagggctttgatcttcatctcatgcaccaaaccaaatcatgcctattacaatagttcacactggaatttccagtatctgcaatttctttccctttctgaaatcagataaagggatagtctgcagatgactgatagtcagctaggcaaaatacctgagtcctaacttagaattggctctttatctaaagtaatttcaggagaattatttcataataacatgatattctgtagtccatttacataaaagtgaattcagttatgtttcccatagtttagtaggacaagctggagattataacaaataggtaaagaatactggccgggcgcggtggctcacgcctgtaatcccagcactttgggaggccgaggcgggcggatcacgaggtcaggagatcgagaccatcccggctaaaacggtgaaaccccgtctctactaaaaatacaaaaaattagccgggcgtagtggcgggcgcctgtagtcccagctacttgggaggctgaggcaggagaatggcgtgaacccgggaggcggagcttgcagtgagccgagatcacgccactgcactccagcctgggcgacagagcgagactccgtctcaaaaaaaaaaaaaaaaaaaaaaaaagaatactaacctgttcatattgctgttgatttgacttttctgtagtgatataagatgccatacagaatgcatttatggtgtttgacacctgcttaagcctttgacacttcatctgcttaagcctttgacacttcaactctaattcatatcaataagaaggcacaataagcaatatgactgtcagggatctgtaactccgaaaaacttagagaaaagcatttctgaagaaaggaccataaaatatagtgacttacacaattgagttacataaacatcactggatccatgagttgataccataaaatctaaatgtatgtaacagtgaatggtcataggaacataaattgcgtcactgacaattaggcaatctgggacctgtaaggaaattaaatgtgttcatggcttctactgcggttagtaacatacaataaagagcaaaacggagcctccagagggattctgaaaaaggttgtagacagatgttatgaaacttaaggtccaacagaagtgtatttaggtcaaggaaaaagattgaacaaggaaagaaagagcagaaacagaatttgttgtgtgacctctagaagcagtttcaataggaaatagtcttgactcatactttctaaaaaaaaaaaaaaaaatgaaattagctctgaactactgttaaactgacatcagaaatctggatctaattggagttacataagaaatattgtagtatttgagggttctatacatagtccatagaaaatggattgtttttgaaaacaagattcaaagcagtgttactttcttaaacaaggcttgtttcatatagccattcagttgaattaaattttcttagaaaagccattttaattcttttacatagtcttcctctttttgacatacatataaagatatagaaatggatgtatttaacagaaacacaagtcacattgaagttattggaatttacatatatatggatacatatatgtattcaaaattatgtttgattcttcaatgaaagtatgaaatacaagagaataatcctatgtaaactcagcctatatcctagatgtaatcttgctagtcctatatatatagaaggaagccatttgtagtatagctgtcttcagatagcagacttatttaaacaattctgcttacagagaatttaccaaaatttcatctcctttcccttcattccaacttatcactctcttatttccaccacttcctctcctaacccctgcctcacacacacatagagacacaaacacaccacttattctagactagatcactgccctaggctatgcttggcttctaaaaatccttcaagaactacaggatgattgtatatttagagtctaccttacccccagctctctccacccctgtcatgaagagaatgaaaacattacatcagttgtcctgacatgggaaaggatccttgcaactccttagtaatagacaaggagggtcaattcctaattgcactcattcctacctcctttaagaggtgggcccagcaaagagtggtttgctgtttgttaggcactaactccacaaaattgggcctcctacaaaaggagagaataataaaaatatatttacacatgtaaactatatttctactgccatgttttgagccatagaatttaggatggcaaggaattatatactatatctttaaaatatagaaatagtataaaaataatcatcaagaaagcctgcatatacctctttgttacgatgaggataccaacttggttttcatttgaaatttttgaaaaagagtggcaaccaaaaatacatcatattatattaaatatgtctctggtttttggggagcttttggggttttttgtttgttcattttttgtttttgttttctgagacagagtcttgctctgttgtccaggctagagtgcagtggtgtgctctcagctctctgaaacctccacctgccaggttcaagcgattatcctgcctcagcctcctgagtagctgggattacaggcacatgccaccacacccggttaatttttctatttttagtagagacagggttttaccatgttggccatgctggtcttgaactattgacctcgtgatccacccgcctcggcctccgacagtgctgatattataggcatgagccgccacgcctggcccaaacatgtttaaagtatgaaatttttgcagttgagacataaagctaaggaccacaaaaccctcaaacctttaaagaaaagtgagaggaaaagaaaaaaatgacttctaccaaacaccaaactgagtttttttttccccatttttactttaatcgccttttgtgatcctagtttacacattctgtcaaccttgtttacaaattactttcttttctttgatagtaagaagaaagcccaaagacaaaaccagaggcaactggctgctgcatcgcccacctagtggcagtagtgtgagctatggacaaaagatctaagtctccaggacaaagagttgtgcagctgctcattttcctgttgacttctgtctaagacttggagatgtttgtaagattgggacctacctacagaggtatcacactcctcttggtctaactcactcttgaactgacattcgtggtgaatttcttttgtcacttagcatattagaagagatgttttactataattctcacaatcaatccataagcaagtggttaaaggcctttttgtacttagttatctcagcactgtcagggatggctaaagagaataagcatggcctctgctttccattttttaacatatgacaactaaaatacaaaaaaacacaagttatgacaaacatataatgcttcctctagacaagcattgcagcttggcattgcactaagtgttttgatactaatccattaaattctcccaccacccaacaacgtagaatatatcagagagtgaagcatggagaatttatataatttgctcaaggctacaaagctaataaatgtggagccaggattcaaatgtaggcattctgattccctagtctatgctcttacccagcatgttatgctgatgctcaaaacagttgagtgttatattaatttaaataaaaaagataaattagagctagagagtgtgtaataggctccatggagaaagtcaaatggacttggaacttggcaactgaagagaccatggccagacaaatggcaagaaattctggcaagaagaacaataggcatggagtgtccgcagcagaggaaagaagccaatctcactacagtggacggaaacaaggagaaattaaatgagatcattagaatggaaaagattgtagaaatccagataatttatagtgaaaattgaatttctaagagggtgaagttaaaattgggttaatagacactatctcaaaaatgtaatctgttacattacaacagaaacaaagcttctcatgacatgcagagatccataaatgactgttttacttttggcaaaattgaaaagagaataatagtgactgcagggtcaagattaatgcatgctgatttttaggtaacatgggagaattaaagagccagagtttcactactggccaccaacagtccattttaatgtgtactcagtctttgtgacctctgtccattagagatatatcaaacttgtatttaaactgaaatgtgattagagccatgaggcctgcctggaggtaaagcaggttgagaaaaatttcctcaatgacacattctctatggaaagtctttctcaaaggaaaagaaattgtgtcctactggcaaaaagcagaaaaggaagtggggaggggaaatggaaaaacatctaaaccatctctggggaaaaggtgatactaaatataaactggccatcaacatagtgaagctgaagaaggcaaggggtgtctaaatgtatcatcagaaaagttaagaaacagggcaaagtaggctagcttaggaacatcaacagaatattggaagaagaacagggggcaattttataacctctcaatcatttccaacttcttacagtgctccagaaaagaaaaagtgtccttgataagaatgatttattgaacaattatctctttccgccctcagctctctggaactggacaacagacagatctggtgaattataattatggagttctccagaagaacttcctctcaaggatgcacaattttccagttagtcacaaggcagcatcacaagcaaaatggggctctctctttatttaacaaggcctatcttctacacacagtttctgcaatttccgcttctccttatgtgtatctttctctgcccttttgtatgttccacttatgtaggattgtttgccccacagtcacacacaatacaatcatcatgctaaccccctccccaaaaactccctactcccttttcatctctcccattgctcctccacactggtcctgcgctggcctgtttgctccctgagtaaattagatccctgcatgtgctgctcatcttccctccctccaccttccaccatactctcttcatgtccacatctgcctcttggcaaatgccctgtggaagagagatttttcccaggctctcctcccttgtaggtctctttgtgcctccgcatcctgagtttcctctgactcttgtttctttctgcttcttgtgacagctatggttacagctaacaagcatgggaggaaggatctgagggaaagttgtgcttttggttcactaaatccttagatttgatttgggtagtcagaaagtgctaaaaagtttgtttcaatggaacatcctgcagtcccaaatggggtaaacttatcttgtttttcatctgctgtcatggttaactggcaacttccaggtacaaggtgactgtctggcatctcaggtgcacacatgaaggcaatttcagaaagaatgcctatggattacagaccattcagctgagttttatctggggctttctggcacggaatatgtaccagcatcttagatcaattctggcacattattttaaaagttttttgttcctgagttccttggtacctgatcattccaatattttctgccttacaaagtcacaggaaaacaggtttggagctgagtattttcaatcaccactgacttggtgacagacactaaactcatttcacttaggattataggttgaactcaaattgggatccctgaagagaaagaccagtcctttatccagtaccttaaggaaaacatttcttatttccattaacaaccagaaaaggaaagacagtgcaacagctggaagagcactgcaaatatcagggttacaaagagtaacccagaaacctttaaaataatttaaagtggtgataaaaccagtaacacactgcacttctattaatgcagtaatccttaacccttgaacctaacttgtacttacactaagaagtcagaagaactgtttttacttgatctaccaaggcaatttcccatagtttgattggaaatagtgctgatgattttctcatttaagttatctacaaagcactaaaaaaaagtgactctgctggaattatccttctaagaaaataagaaaaaaatagaaatttcttacaactaagaaatggatcaagataacattggtctgtgagatttaaatctatcaaaatatgtgagcataccacagatatgatttcttcagttctctgcaaggtaaccaaagcaattccaagaagtcttattttattagaactcaaatttattaagtatgacctatctaagatcatagtgggcagacaactaccttggacgtggggttaagagaagataaaattcaaaagtttgaaagtaagtaaaggataagcaagattctttgaatgatcaacagcactccacaggcacacagagacacaaaaacagctaaaaaggcaaggacaaaattaaacagtaatgatgatttatagtaagatactctgagacatgatagaagtctcagtacaccaaaaggaaaatcttgtttgctcaaattatttgtttcttctgtctaatgaatgtaattctaatatacaagtgataacactggcatttctttgaaatgttgattcagtttaattatgaaaatcaccaaggtattttctagctgctgcatcactccctgtactaagattaatcacatcaacatcattcatttaatcttcaaagaggaagcagttgtccacaaaagccttcaaatagcttcattagtgcaatttttcagtctcaaacacttagctagcagcatatgattgagagtaaggtcattatattcatctatttcctaatctaatttttgtaatgtttctacatttaatgtaggaatgtgtaagtgtggagtttttgccttctctttgtttgtaaaacagctcaaaacatgaagaaaataatgattctaattataaaatatttgattgctatggttttaagtcatgaaatttaatgtacaggcccatggccagttcattttttcttttttctttttttaatgtgaaaagaatttagtgtagaaatgctctattttcttgtctcttgtagacaaagaaaaacttagcgcatgagagacgtgtctgacttcagaaactggaattacaaaagtcactgcaaataaaatttctttggtgttttaaaatgcaagatgaattctatatttaaaaacagaagcctcacttatgtttctctaataagacccattcttaacatccttttctttgatgaaagcattaatattccctttccttattggaaaccaacaggtatcagagtcccacaaaataacactgtattgttgatgcaccgatcaaatcattcttttaatcattaaaaattatgcagttgcaatcaaaaacattctcagagagacttagagcagagcctggcaccagcagggtgtggtgatatagtcatttgtaattactgtacctactctgaagggttataaaatgtgtcagaaagtaaaatttgctgagccccattaccaagaagcaaaacttactaactggtgctttaaactttgcatcttataaaggaatgatttatttgacttttgactggtccacttgcagaaatcattacattgcaatattcagtgactgtgcaaaggggaaaaaaaggataaatcatacagagacattctcaagttaacatctggcgagcatataaggccaaatctgtaaggcaagatctgcctacgatggcataaataatggtgtgtatttgcagtttaggccaagggataagggcttttgatcataaaaatagttcataaccaattgcaatgagatgatgcaattgtaaaaattttgtttccacaaactgtataaagacaattatgatattttaaatattaaccccttttaaattgttttcaaataaaattataacggctttttgtaaaaccaaattctaattgacccaatcaaattttaagataaattatgaaggtgagaataacaccagcttgaaaatatcagtttgccatttgtccagctacatgcaaagtcaccagaataaaatggaattatatgaaagaggagcaataaactgcattatttacatgtgttcaatattataatcagaggtaaaaagtgtgtttttaaatatttgtacacacaaagttttattatctactttacataatactgtgttagacacactgggaaatgcaaagatagaaaagataaactatcttctcctgagaagcctttactatggtagaaaagataggagcacatgtcattacaataagaggaaatgtgagataagtgaccaaagaggatttttgtcttaaaaaatcctaagtttttatctaagagtttacaagtagattcttctgagccagaacaccatggaaggtttcctggcatgatgacatatgagattcaaggaatgggtattatgttcaaagctcaagactggggagagaagattacattttacagtttaaaatattttatttacctttcccaacacttatgcatttgtatcttctgcagcgaatgataaaatttcttttgttttcagaagtgtcaagataattttttattaaaataaacaaataaattcgagaagactcagtactcattccagttggcatttttgaaagtctaaaatacccattttaatggttaacgccaaacatcaaatccatataatccctgagcaagtgtacttaatcatattctaaaaaaagatatgtctccttttcaaataacagaacaagtttatttctatttacgtatatctggctggaaacaaaaatgatcataatttagagaaaatgtttaaaactctgaagcatgaagttttgtggagcttgtattgtttctctctccctccctccctctctctctctttctccatatatatacatataattctttcttcaatatctgccttgggttagaagtagaagtttggtggtaaaggtgaatcccatcaaaagacccgtagtaatacaggaattcaaatattatttgttgaaagtagaaaataaaaaatataaattaatagagcttactgaattcatctaattcatacacacttctaatatgcttatggtaatttcaattatcatcttaaaagaacccaccttgcagtaccagataatattgggaaatcaacaaactaaaatagtcttaggaatagtgaatgtatattcctgtttgcaagcatataaaggataaatacagacaccttgacaaaatatgaagagttcaggaaacagaaatgatcttatacaaactaatgtctaacctgggtcctattctgagcctctcaaatgtgtcttgctaatataagaacatgcattggctcttttaactctgagagtaactgagaagcctccttcacagaactctaaggagcttagaatcacctttctgaccatcttttctgcttctatatatcctcataaaatatttactgttcttctgaatgaccactctgattatccttagactcctttcagattccctgatgatgtcatggaaatgttaaacccattatgctaagttaggacctccatctgcagtgacctcttggcacccgcttcgaggacagcatgatatttttacataaaagttagtcttcattcaaatcctcgaggcctgatcctgaaaaaacactgacagctcaatcaaccctaataaatacttaactaggtccatgaaaaataataataatacagtttccaaaaaaatccattacacatttacaattgagtcataaaaatgtctattaaatgtacaattattttaccacatttttattggaaaataacatttatcctaatttacaggtttaacccaaaggtggtacatgacattccttttcattaagctattggaggagtgatgagtgacggtgcccagctctaattatctttaacatagtgtttcaaattgatcatgcataatgcaattacaaatcataattaaattaatttatattgatttaagattttataagttgttaattacagtacagtatatctatttccacaagctaacaatattttcaaactgccaaagcatttccttcttttccaatttcattctcaattaaaaagttcacaaatttatacctactttatgtgggtaagggctaacttcaaaactgtaaaggcaatgttgagtatttatagaagttttctccaagaaatgatgtcgtatacatttgtacatttaggatcatctgaatttaaaaatacatctatctcagaaacactttgacctgctccatctgctaaccactctgtttgccatacctgccttcacagcttgctagtattgtccatgcacatagtactagtttctcaatacgtgttctgattgagtgactgactcgggaaaaccaaaggaaaccaatgtaaatgcaaaagtcctttcctgcaactgatggttgcagaagaatctggaagccaaggggaagcccaagcgaacgttgtcctggcaagaaagcctggggagttggacttgtccacatacttcccttctcttctcacccaatcacattcgagaaataaaattccttcagaaatctctacatcagaaggcaaagtggacaatcaacgagtggataatccacacaatccaagaacatttcctttctcttgtttctctctagaactaaaggagaggtggaagaaaggaggggtgtgagaaagggagcaggatggattgactctgaaagccccatcactgtttttgcgacagaaacaaatattagacaaatgtgtcaattcactctgaccggtttttttcacatactaaagaattattccttcaccttctcatacctgaactatacatccagtcagatttgtggcatgacccacagaaacataacctggtccttccactctccacaagccttggaactggggttagggttatgtggattgttgctctcaggcggctgagcctagaattgaggattcttcccgcccggccacggtgcctttctctgaatgtgttaaatgccttaaggtcctacgaagggaaaatgaaaatttgaagtaattaaatttaggagggcaggcttggaaatggaagtgacatgtttatgagaaaggtacaggaatggttattataaggtatagtttcccggaacccagcatcctccctgtaaggactggtcactaacactatgggcgtgcacgctctaagcaagtagaggcaggaagtctgcgaaaagccccagacagccactgcagtgccaagtgtgctgctcactagcgacccctctaggtcttagagagaagagagctcatgcagaagagtactcgggaccattgccgggacgagaagcccatcaggctgactgctccattagggagcatcgcaagctcggggtgcgaaagcttccccgccgccaaccagccagccctgccctgtgtagacgggtcgccagagcgcggcgcagggatcgagctccgagtagcccaaacggggaggctcagaaatgcacggggagagcactcccctaatcataagacaggaaaaaaaaagaaagaaagaaaagaaagaaagaaaagaaaaagaaagaaagaaagaaagaaagaaagaaagaaagaaagaaagaaagaaagaaaggaaagaaggaaggaaggaaggaaggaaggaaggaaggaaggaaggaaggaaggaaagaaagaaagaaagaaagaaaagaaagaaactcgaggtctcggggatcccaagcgtgaaatgaatgggagagaaaggtctgaggaaaaacatgcgaacaccgaaactcaactggaacctgcgcgggacttcaaggagcagaaaatccagcgcagagctagggcggaggcagcggggggtcagagaccctccctgtttattgatcacctttggcatgaaatatcttgtatatgggttcggaccatcgcgaaggtttcagacacaaacaagctacagcaacactttctctacgcatcccctagttattgaatagcacacacacacacgcacacacacacacacaaacgcgcatccctgagcaagaaggcaaaaaagaatccaaaacttgagcaggtcgccaggcccttttcctctctcagccaaagtatgcccagtctacatccccgccccaccaccccagccacgcgggcgggactgcgtccataggacgcacctcgcagatactgcagcctccctccagttgttccagcttcccgaggccccagttgtttcagtcccatcgccaactggcaaaagcagttttctagtctgccttctgaagacgtctctttttatccaagtacttttgccataatatatgggtagtgtctcactttccccaactctacaatggactcgaatagactgttttgtctttcgccaaagatttgagaaagattcttgagctgtggagagatttttgcactaaaaagattcttgaaggagaaggagtaggagagaagcaatagaatattttcaagcaatatccaaacaggcttctagactggagaataaaattaattcaataaaatataacacatttttttccttaactaataatactcagagatggtgatatggatttcattagacttgagttacagtttggttgtagactcaagactgcatgaattctgtgtgtgctgttcctgggattgggctgaagccttaccctccaggaattagaatattttcggggcaaggttggagaatccattaatagaagaattattttttttaaaaaaaactcttgttttaataaagtcttgcatttgaggctaaattttagtatttgtctgagaaaagtgggtgggttcggttgtgtgtgtgtgtgtgtgtgtgtgtgtgtgtgtgttttccttttggcattggtatgtgtgatttgcagtccaggttgttaagtttccaagcaggaaccagttaaaaatgcatggatcctattatatgtacaatttaatcacaaggtatttaaaatagacatttccatctaaaatccaatctgaaatcaacacagttcctccaggcattagacgttcatctcgattttgcatttgtaaactgggagaaataaatgtgacttgtggataccaagaggtcaagtacggctgctcaaatatttttcttacaaaatgacggatttattagacaaataagtagcccggctgatgcaaaacccccagtgattgaattttgacgttaagtcaacaacaactcgaactacatcagtggttcaagatttagttatgatggtagagattactgaacaaataagagccagaaatgaatacagatttctgaggatctgcccctggcaccctcttcttgacattctcctccatatgctccccctattcatactgtattataattaaaggacttagctatgccttgcgattggaaaggaactttaaaataattaggcatattttcctgtttttttttttttttttttttttttttaaagagcaggctcaaggagaaaaccagttgagtttcataataaattccttcttggcctgaaagtcacccaccattagaagggaggtagcattcagtgggtgtttttctttctctctccctttttcaggttttattttcattaagaattttgataacctgctctttctctaccccagcccccaccatgcccccatgcctcttcctcactttcctatgaaacatcactttctaaaatatttgaggacttaggctttatttagtatcccacagaagatcagaatccactgctaaataattaaatcgccggtagatttttaggagtatttaggtttcacctctcctgggtcaatagctgctctcccgcccgctctccccttgaccctccctggagctggccgcggtgctgaaaaccttgcgtgactcttgtgaaaagggagggcaccactaatggaggatttggaggagttacttatctttgctcttcatgaaaggaagcttaaataattgagactacatttaaacataaagcagttcatttctcatcttttcatggagaaagggactgatctgctcctagtgtgaaaatctgccttttatttattctatgtgtaacttccttattgtagtggaatagtgactcaattttcatttgactcttgtggagccagccaagaatccattccttacaccttcttctcttattctgtgatttttcagttatagtttggttccctctagttcatggaactgcttattttgcagggacaaatctatatttcattttaagaattcatctgatcaagggcttgaaacaatttctctttgcagatagaaatttgttctttgggtatccaggcacaaaccgctagaggcaataaagtggtgccagatttttatcctagattttatttaaatacaataataatcccactctgtaaaataagttgtccatccaagcttctctcccagtttgccatatatctctcccatgtatgcatgtactgctaatttgtacaaatgttttacttgtgctgggttctaaatcatctattgctttggttgctctcctgataaataaacctggacatccaaaattactaaccatctaatagtaacagaattcactaagtagaacgaaatgtttcataattattttgccactacccacaattaaataataaattgtgaaaatgaagctcttctattagggagggggatgtcgttctcttttcttcttccttttaaaatactgagtagtatcttcagtctaacaatacatctgtttacagtttgcctgaacttgtttctgaatttatatttcaatatgctctttaggatgcaaaattcctgtcaaattaaagagtgctcatgtcttgcccgcttctagcaaatcacttgcagcacctaataaatccagctggggttccttccatggcctgatgctgctgaaatcattattgtcctgccttgtttcatgtcagaggcctcttcgcctcatctgtcatgaaaccaatttcactttatttacatccatttgctagtttaattactgtgctgatgaatagcctgaaggaattaagttatgagtctttggaaacccaaagcgacagatatatgggctaccttttaactacagggaaagaaatgaaggctaatggcatgcaccaaaatttaaagataataagtgtttctccctacctgctactgttgaaattcaggatgattctttcttcatgtattcatcatctcctggatgaaatatagtgctttagaatctgtcatatttacagattgacttttagaatctgtcatatttacagattgactacagttctctacaacacaattttctatttttaaaatcttttttttttttttttttttttactaaaagagtcacagataatttactagccaaaagcagtggtgtttttaattaaaaacacctctcaatattaacctgtccctgtaactgagcacttacttctatataaagacagacaggttcccttgtgaaaataaagaatatttaatacctcccatctaatacatagtacaaagtactccacttttatactgtaaatattgtaatagatcgcactatataatttttgtttcttattgagtacaatttcacagttatcttttttcaagtaatcttgcactttctaacacaattatcttctttaatgtatttttgaatcataaaaacattctgctgcctgtctcttttacatatccaatacaatagagcactatcagtctttgttaatgacacagggcgtatggggtgagtgaataatctgtgttctcaatatatataagtagtcaacatttacatatgtattttttaaatctaaggtcaataaacttttcaataattctattatcttacaaattaactactgcagtgtaagcctactaattatgacaatattaaaaagtcattttcaagggtattctttcttaaatgctatcaataattatagatttttaaacttaaaaagtattcttgtggcccatcatcacttactgccaattataacaataagtaaatatgcttgaattgactttttattttatattttctctatcctcaggtagcattgcacatgaaaagaatgtaacttttaaatccaagaacctatatgttttcctttcattgctctgtttctgatataggtctgatattttaaaatctgtacttccacttgatttctctaaaaagaattagtttaagacacatgacaaatatggtcattatttcaagaaagaattcaaatatttttcttacacacttagtatacttactcattcatgccctctccatgctgagtatataattacatctaatattgtgcaaactttctaaactagttatttaactgaaaacaattttaaacactcaaaggcaagagatattactaaacaacaaagaaatgaaaaagatggaacttttaatgttttctcatttcttctccttctaaaaaaattaagtactattttctatcctgtatattttgcagtttcatttatcaaaaagccagcctaaaggaagaaacaaaaatcttaacacattacatttactctcagaagaactaaaaaaagtgaaaactctactgtccatgcaaatatatattaataattatatattcattacaaatcccccaggcacctccctccatgaccttcttacatcccctaaacatacaatttccgtattctcctcccactacttttaataaagcacatttaccaaacaatgtacataacaaaaataacttttgtgccatcagagtcttgcctatagaagttttgcaataaagcaaacccaaataagacctttcaggtaaaatatccatctatttcagtagaaccaaatgctatgctaattacttagtagacatttatgaacagtctttaactcgacagcaaagaaattttattgatggagccttctttagatatttttattcattttttatttaaaaaatgaagacatgtgagttttaaatgctttttcttttcccctcctcctcccccatctctctcattctccccccttctgaagaccctctctttcctctccagctctttttgattaatagatccatgtggctaacggcctgacatatggtgtgcgaagcagcttgagatagtaccttaggcatcccctacggccattaacatattaggggcttatgtgcagtcagacagtcagacctcatcgagagccagcattttcagaaaggctgaaccccagagctgtttgatagagagtttcaataatgcaccactcttcaattttaagggagttgcttctggtgctgaaacactgggacagaaccagaataaagtttagcaataagactcagttacattcaacagcaacagtaaaaaatgcgcttacatctgtttgtatatggatatgcacgtggaggcacagcttcaagctcacaaacatacaccagctcctgagtattatcagtaaacaggcaatgtcagctgcctggatttattttgtttaaagatttattttgcttaaagtcttctttatacccagaatactagcattgcagtaacagttcagttactgatagaggagatttaaaaagcaaaaacaaaacgcagcatcatatttagaaagacactgctctgaatcatgtagtttgattttttctctagtagaagaaattaggtgcatttttacatctgtcgtagcctcaaaacaagaaaaacaggaagaaagtaatgaaaatttaacgttaaagaatgtgatcgtgctttaaatgcatttacaggtcaaatccatcgagaggtaatcaatcttattccgcaaaatctgaaagtttacaaacaaaaagtcttgacaactctgaaaggtgggaaaaaaaactctaggatggggtaggggtgtgtgtttgtgtgtgtgtgtgtgcgcgcgctcgctcacgtgtgtatttgtatatgtattatttgtatatatacgtatataaatttgggacgagggaaatgatattcaaaatcaaagcatatatcacactttaaggttatttaattcactttaacctcgtaactgaagcttgaaattcgctttgcccatgttcttctccttccagcctcctgctgataaaccactgtaccccttttgaactgtactctagctgtttgcttggcaaataaatgctgttccgccctattaaaccttttaggtagtttcatcttcggatttctcaaatacaggactaataaggaggtgctttgatgctgttttactttcaaactatagccccaaggcgttaaaacgtgcaaaaggtaactggaaaagcaaattgccacgagcaaggcgcaccctccctttcaaaaccgttccaaccctctgagtgcactgcgtggaagccgaaaatctccctgttcctgtgcagaaccacgtcccgttggcagcccctggggttctgaaccggtgccacaataccaggggagtgaggagaaaggaggcacttttaagtttaaaagccctggaatcccttgggagaagggaaagatggaggtagggaccggaaagctttccaaagttgattctgggcaaacaaatatcaggtgaagattaggaaccggcaacttgcttaagcagccagtattaaaacttttgcataaggcgtggcagtggtgcgcgagagagcccgcttcttggctctaaggctgatttcaagcctccggttcagattacactttggaaagaagaccccggcgcgcactcccgcgtcgaatacaatggactccctctccccacagtcaacacacacacacacacacacacacaatcccttagtttaatataagcaaatgaaacaattgaaacaaatctgttttatttaaaactgggatgaaagcgtctgtcgctcaaaggcgtcacagtccgtcacattaagataaattttcagaagaaacgcaagccctcgggaaatacctctgcccagagtcaaatggatcctacctgcttttttaaatgcctgcatttccattgctaactcatacaacacattttacgattgtgcaaagtgcaggacagttgagccccaatgtcagcctcagagctccttgtcacattcagcttctttttctctctctttctttcaacacaacgctatggtgaagtcacataagtgatcaaaattaacataaatcactattagttattaggatttgctctaaattacactgtgaatatcgtaccagccccatctgccgcccctgctctcgcagcaatagattgcagataaaataaatgtccttaccccattagaaggttcctgtctctgtagccaaaagccaaacaaaagcaataaataccgggctttttctctccactattcagctgtgactcttttcatcagctcttcttctagaaaagctcaatagctgcctgaaaatattgcattttatatcaccaaagggcgattaatattgcattaactgtatttaacattttttaagcgcgagtaatctgcaatgagttagttttctgttagtaaggacagggggtatcagaactactgcagaccacttaagatatccgtacgattgtattatttgtctcacacgtagttatatatatatatttagagtgtaccgcgatgtttgaagtggaagaggccgtgctaatggcctgcttaaagtattctgacactgtctggagacaaccaggtctctgccttcattaaaatgtttattgtcaacatttggtgggggcggggagaaggagaaactggtttaagtgaatttccacggctggaaattgacaacactttgttttattctaatctatgtctacaaaagtttgtatatattatactgcactgaggccaggcgtaagagttatcaaacaaacttttgtttgtaattccttttacctgatcaatgcgaggagtctcttcctccaccactccttttgacaactttccttccacgcttttttttttcctcaatcggaaagcagctgtctttcgccaatggggaggggactgggacacgggcgcttcttctctccagcccttggttcgccggagcaggatgctggtctcaacactagggctatgtcggcttctcaccgaaccgagattttcaatttcagctttgcgattcaggattccacttgaattccccaggacgaaagcctagcggccaggctgcatttcgccccgggtataaatccctgccggataaattcaaatctgtagcagggttttggtaatatgcatcttagcaacaaaacaaaaaccaacctcgtatgccttccagttctttttaaaacgtgtacggcagttgtgaaagttttgtggtgcttgagactgttgacttatgcaactggggagagggtttttttaaccgctttgagatattggtccatcccttttctctcagaacgtcctcaagggcacgtaagagttggaggtgacctccgggagcgcctaattttgagccgcggaacttcggcccacttctccgaggggaccaggcgcgcgccaatacgcatgtgcgggctctgagcgctcagagcgcgcctcttccttcccggctccccgcggtgcgcacccgctggccactctgcgcacgcgcgccgggtgccccggcctaaggccgttgacctcgggttctccccggcacagtcgaatccacgccagggccctcaggccggtagctgtcctgcagtccgagcggagctgcgacctcgggcagctggaagcctgtgggctgctgcttctccaggcaggcggcggagggatgcaggcaggatgagcggcggtcccttcgccgccacccggagaaccgcggctggtgcccttgaaggccctgggatgcctgggttgggtgggtgagtgaacgagaaccctgagtgagtgaggggagggcgggtcccctcctggcttcaaattcaacccaatcagctctgccgatggtttgaaactgcacacgccgacccacccgccccgaagtctgaaagttatgccctggagacctgcgagctgcggagtgcagctggagagggagctgccccacgaggaggcctccagaataactcccggagtcggaacagcgctgggctgctgaagtttgcagcctccggatccgcgccccgccctgcagatccaccggatttcggggagggaatcggggggctgcccgtcctcccgtaaagctgacttgacaacaattacgaaagtttttaattagctccttgttataattcattttatttccagaactctccgaccataaattattcaaagagtaagccaacccgagcggggcggccgcgcgccttccccacgcgcgccgggctggctctggccgctcagctcacccgatgccccgtgagccagccccgcgccagaagccgcggtggcaggaaggtttgatcaaacattaaataacgtaatgtttgcgacaaggcttatctcacaagtggaaaagaggacctcgcgagaattagaattcggctgctattttaaaaaatcaattaagcttgcggtcttttttgaaacagctcgaaaggactgcgtggctatcatcgtggcgctaagactgagatggcaataacaccgatggcagaactgtaccagtattaattgtcatcacctttatcatcccgctggccaccaaggccgttcgaatggggtgggaaaggctagttttagccaggatcagaagccccagttccaacttcacggacgaaaaactgcgaaagcctatcaacttgaaagatgagtagggatacttcacgcaggtgccaggtgctatcaggagaggccggggcggcggggcagaggcagagggcagggatcgctgagtgagtcctgcgggcttggggcgccctgttctctcacgtgcgctgccacgtgtaggaggaactggaccgaagtagtctcagtatcacaagaaaacaaaaatcgatacaatcacggcagtgggtgcctacagtttatttatgaaactgtaatcgaagttgagagcaatttcagaacacgcattaaacaaaaattattcagaagttagttgatgggtcttgaggacataatttttttagacctacagaaggaacacgacctggagctagaactggggaaaagaggaaatttaagacaaatggatggcataaatgtggcagatgctttaatgcttatttgtcttttgcttttcctattccacccccgccgccgcctggatttcctgagaagctgaaatgcaaacggagcccaattttcccactctctcaaacttattttgagattattctttaaaagaatccgagacacacattttatcatattcaccccaaaactggtggaggaatccgcttagagtgaacttctcttcagaactagaaaactttgaaaggccaaactatcactcattgacacccacttcaatgatagtttggcctcttcaggaggtccctttttgtttttttttcatggattgacagttaaaggcgtcttagaatagtcttactactccttcaagccatatatagattcgcttaccagaaagcaaagcatttttttttgttttgcacagtttcctactacataaaataggaaattcattttcatgatgttttattaacataatactcttatttttatgtggtaaaggttttatttaaagcaaattcttaaattcttaatacctacattgatcattattatataatacacatgtgtttgcctgcaacatttctgcttgaggcagactttaaaaaaaaccctttgtaaatcttttcatttgttctgtcctgtttttccaacaatgaaatccagtcatacttttctataaaataacggtttttttacaaatgcattttatttaaaactgatgatgtttcaagtcaataacagcaaaaacaaatcaactttttatggaagagttctatgtttaaaaatacctctagtgctttttttttttaacattaacaactgtttaaaatcgcagcttttaaaatgtactattctttttgaacatcaagtgttttccttcacagatttgccggtgaaattaaaaagatttggctaaaataagatgacttcagatgatataatctcaactcttaagaaactttgtacatttggcatctgatctagtcccaagtcaccaagaaatagaggctctctagtcactgtggagcagtaggtggcacactaaatgttttaaaatgtattaccctccaaagaaaagccattcagttactaggtgtttttagggtagaatatcacatctaaacctccaaattcctctgtccctgaccctaaatttaaatgttttttgggtgcctggttatttattggttttcaccactctggatcaagtgctgtggtttaagagtttctgcagttaaaaaataataacttttataaacacaggcaactaatatagaattcattttatttagagcaccacttttcatgagttatctgaaagtgaattctgattcagcaaaaaaatacatcattctcaatctctcccctttttgtcccccttcaacaccctaccctccccccatttctttgtgttttctttttgtttggttgtttgttgaaaggttctaccaggacctggcccagtataaacacaaaaacgcacccaaatcataaaactgctcttctttcagttatgttttatttgtaagtgtactgggacacatccccctgttgtattttggcgcatagaattggttctgatagaagtaagggaggagaaaggtaaaagagaaaaaacataaccaaggagaaagctcagcagacatacatggacaggtagatcaatccgtgagacatttcaggatgaacactggcagtctgttaccactgtgtgaatgtgtgcattaaataaaatatttacaataatcttttttcctttttctttgaatacaagaatatgacaaaaatgttttcagtggaaacaggcagtagactgtgaaatcgcactagccacaaaacggtctaccagaaagctagcccagtttagtgctcagtttcaaatgcatagaatgtttgccctgcaaacaatgatatacaacataattaaataaataatgcctaaccagagtgagacctaattgtgtttctttccacacctttcagatcatgcatgatttcagtcttgttaatcggcaggttttttttcttttctcatttgttctgttttcaatgttttagttatgattaaaggatggtaacaaaccatctctacgagagatccaaagagtatcttgtacacaaagcaggcattttacctaaccaccttcaactatcttaattttttaaaatccaccagcagcttgtaaggtacctgattattactatgaaatactatacatgattttctatttgggagactggtagtgcaaattaaagttcttgctacccaacatttatcccctgtaataaatgactcttgaataataagaacaagtaaaaggaaacacagttgttctgttttcgcccaacatgcagacctctttgaaacaaatgggggtgggggcactttaaatctgtcttcctcttttctgggatttaggtgattttctcacagccaagtcctaccgcaaaagaaagcaggaacttctcaacatttctataatttcatgtcctccaagagaggaagaaacgggacctagaagagcaagatgagtctcgttcagtggagaaaacaggagagagtatctctcctaataactttcaccccattagtctatttgaatcaacaggaaaaatcagtagtttaaacctctctctaaaaaaaagataaaactgaaagggcaagttaaagttctatgagtgggaaaagcttattttgaaattgtctaaaactagatcttcgacataagaggaaaaaaaactgttgttaaaattgtttcattttcctagaataagatatctcgaagctccggaattctgctttttagtagctcaaagactatgcccttctctccaaagacccccaccccaacaggaccaggccaccagagtataggcagggccacgggaaaacttggattccacctaagcaagcagccagcctccccctgaccctctcttttcagctgtgctcccactcacttcccgggattggagagcagccataggcctctcattggaacggaggaaataaagaggatatggatggggtggaggtgagagagggaaaaattaaacacgcagacagaacaactagctttgatacccagaacttcaacttctcgctcgtttggttttcgtttttcgactcagttcgtgcgtgtagggttggggaggtggtaataatggtggtgctcttttttctcttctatgggggaaaatgaagttgcagattatggctccccggagttaaaatttctaaagcattttcctttgcttttgttctgttttgttttagtttgtctttatttgtctagtttttggtggttggtaggtttgtttttgtacatagttccttggtccccaggatatttaggtaagtgtctctggtcagaaacagtccattttcctacccttcccgcgtctccccccacccaaaccccagaaccatcctgctccttaaaacccctgctcgggtctccgctttccttccccccactccccactcccccgaatgctcccccccttctcccctaccctatactccaatccccacacccagcaccccagtcctcaaggctaggggacagcaaaggcaggaaaatcagagaatgggtggaggaaagagagcgagaagggactccccaaatgcaggcaggataacggacactccaaatccgaggggaggcaagcagaggaaagccccccaaaaatgcctcctcagctccccattctgtcccgcccgacacctcccagccccctcagtaagtggcagagaatttcatccgcttctgcttctgtctctggttgcaaaaccacacccgcaccacgttctttttgaggtccagtttctcggcgatggcggcgatcttctcggacgagggccggggctgcacggcgaagtaggcctcgagggagcgcttctcgggcgcggcgatggaagtccgcttgcgcttcttctcgccgccgttgaagagctcaggcttgttcattttctcgcgctgggcgccctcggcctcctcgagccacgcctgcaggatgggcttgagcgcgatcatgttgttgtgcgagagcgtgagcgactcgaacctgcagatggtgctctggctgagtgagcccacgcccgggatcttgaggttggccagcgccgagcccacgtcggcctgcgtcacgcccagcttgatgcgccgctgcttgaagcgctccgcgaacgcctcgagctcgcgcgggtccgtgtccgagtcgcagatggacgccaggcccgctgcgcccaccacggccgccgccgccgatgccgctgccacctgcccggccgccgccgccgccgctgccgctgccgcgccgtggtgcgccgccgccgccaccagcccggggtgcggcagcccggacggcatgttcatggcggccgccgccgcggggtgcgacaggtggcccaggctgtgcatatgcgggtgagggtgcgcggagccgcccaggagcccgccgcccgggccgccgccgccgccccccgggccgccaccgccgcctcccccggggccgccgcccgggccgccgccgccgcccgggccgccaccgccccccgggccgtcgtgggcgccgccgccgccggccgccgcgcccgcgccgcccgcgccggccatgagcgcgagcgacggcgaggagatgtggtccagcagatcgccgggttcgagcgcctggtggtggtggtggtggtggtggtggtgcgccagaggcaccgtggaagtggacgtgcacggcacgctgttcatcgtgtggtacgtggcgtccggcttgaaaggatggctcttgccctgggacacggcgatgtccacggccgccagcgcctcggcccgcgccagcagcgtctcgtccaggctggcgaagaggttgctctgcagctgcaggcgacacaaaccaaaccaaaaaaaccacaaaaccaaaagagcaaaacaaaacaacagaagaaacacacacacaggccggaaagcacagcatgcgaagggcaaacacaaagcaaccaaaataacaacgggtttgggggcagtggagagcgggaaagacggagagggggcacattgacgaccagggagggggcagacgagaagggatgggagcgtggagagggggacagaagtagggagaaagggggacacaagaacacattccggaaacgggcgtgggagacgaaaaagagggaaaagaagaaatggaaatgtaactcgcagctggggacccgtgtcacacacccgagcacgcacagagactgcctttctgaggcgtgaaattaacagagaaagtagagggaagtcgagagtcctggccccagcgctccctactccgatcgcaggcgcctgacgcggaggcagaggcagacaggaacacgacattaagggccgccggacaaaacgtgcctcgctgcgggactgctctacaccccctgcccgcagttccccgcaccgggacctgcacacaccagcccccgacatgcagcgtttcggagacggggaggggcgggcgcgcgggccggggccgcgggcgtggggcgcttaccggcggcgtgggcaggcaggcccgccggatggcctcggagctggagtgcagcgacgggtacttgtgctcagggagggtgggatgcatggcaaagtgaggctgcttgctgttcatggacatcatcgtggcggcttggcatgtatatccacaaacactccgaaagtccgcgggaaagtgcgtacgccggctcacccggcctcccttcggaggctgcagccgcggcggtcgcggcggctggcggcggccccgccgcgggctgctgctgctgctcctgctgctgccaggcgctccctctgaccgcgcagagcgccgcgcgccggcctcgcggtcccgcttctccgacagctctagccccgcgcgccgacgggatgcactcctctaacacctgagccccacttctcgcggccgtcccggggagctctcgcgagagctcgcggccccaccgcgctgacaggcatcagctgtctccgtctgtctgacgcgcgctctccttctcggcggccccgtgcgtctgcgcgcgcgcgcgctcgtccggccgcgaccagcgcgtgggagccgctcttatagtgaccaccagcaaggacagcgcaggtgatgcacctgtagctacccgggcatgcgcactgcccgcctcacctttcccaccgtggtctggaaagatcagaaggtccagctattgtctaagggtgggcaccttttagaataaaaaagacgagatgcgcgcacgcccctctatgtgtgtgtgtgtgtgtgtgtgtgcgtgcgtgtgtgtgtatgtgtgtatgtttcttctccctgatagcaagccttgaatatatgagcattacttaggcattcctcctcttcgggatgcctaacaagctgttgtataatgtatacagctggacatttctacgttaaattatgcccgcgcattcctctgtatacagtataaataacaacacagaaatgcagaaggtgctgtcttttgctgcaagaacctgtttctttaaaggtttataaataggttcctggagaataatcgcggtgacagacatttgtttgaagcagtcagacgctattgatttccatataatttaatttcctccgcatacttttttgttgttgttgtgaatataactgtgtcaggcaccgccagtgacagccacttaggagccacaaggagcgtgtgctttctactcgggaaaagctgttgaaatgaaattgtgcatttctcttattgtttgtctccttcaaccgtgtacaaacccacgtttcaaacgagctccgggtgatctaaggcttctagtaatcaaaaggaaaaaacagttaacagggtgtagttgggatccttcctcccctcagcgtacacacacacacacacacacacacacacacacacacactttatgctgggaactccaggaaaactgcttcagagaaaagggaataagatgttgaaaagagaactttcttttcccttccatctttttggctttttgcctcatatctctgcctgcttatatatatttttttcaataggagacagatcaaactaacttacaggaaagcttgattcaaaaatattaaatcaagccaatttgaaagaacggggacaagctctggtccagtttttaaatttttaaaaaattattgtgaaattaagacctaaaaagaataaatcaattagccaacctgttatatggcccttatgtggtagcagatcaagagcctcccaggggagccacagttcaggtgccaaagtccccagggaaggagcacttgctcgcggtgataataacctaacagcccagatgttatcacatctgcggtaagagagctggagagcagcaaggggctgcttatggaaagcagaaatcagataatctttctgttctctcccacaccaaggaagtctgtatttccaccaaagagcagatctcatttctataaacctaaatttgcgttcccgtggattttatctttcctctgcacaaatgcatgtgtgtttagcatacccactcacctactcagattccaagaagagcccacaggcgtcaccatggctttttctttctttcttttcatgttcccccccaccccctcccttccttctagctccagagggaagtgagaaggatgttcacttgctggtgagagaaggagctggttccatccattacgcagtcccctgggagcgctaaatgcaactttatctcaacggggagtggacgatgagcaggacgtcgctagagggaaagagtgagtcctacggtagtcatcacaccgggagtccgggcttaacctagtccttcctgacacccctggtggccgttccctgcgctctctcttgacgggaaagaaaaggcccccacagagggtgagggcctggaacctgcccctcccctctcaaggaagcgctggtctttagggaccctgaagggtacaggagcaacagaaaggtaaacagtacaggtttgcggccgggtggggcctctgagagccaggtgagctcctgagtacccaaaaggcacctcggttcaccctccaaccctgggaggcttccattaaacccagcggagagatgccaccttagcctgaagttaggagttagtcccaccaagatttccttccctgttcacctctctttcgacaacaggaataccccaccttggggtgaggccagatctttgcttggggtattgggtgttttgatgggaccagaaacatgagggctatgggtacaatcctccctccccctcccaccatggataggaagcccatctaggatacatccatcttcactatagcacttagtgcagagtttgtcacaggaaaagtaccccaccaaaaaacacgtgtgtaggaaggaagagaggccagtttcgggtagcctgggggaggggtggtggcctaggggctgttcaacaatccagggctggttggagattgcaggaagatccctgggtggggggatgggggggtctacattctccttaaaaaggaggggtgtgttttccccaggcagagctgtaaatttttattccagcctgttctttttcaggagccaattatttcactccgccctcattaacttgctaccttatcttccttcctcaaattcttgctgagcggtagtctggcccagtacaagacactggagataaaatgaggtatacaatatgagtacctgccctgcaggaggtgacagtgtatgtgcgtggggaagccacggataaaaggcatctatgacacaggtataacaggtgtgatgagagggatgtgtatagaaatatggagcgggtgatgcttggacagttatcatgcctcatcctcgttggttctcagcccaggctaaagaatagggcatgctggcacatctgcaggcagttccctggaccatatcaagcctctccctactttcctcctgatgcgtaaaaggaaaaggtggtgggcttgggctcagctcacccatatgtcactgttttgttttcctggtttggcaactgctgtaactcgttggcccctgcctgtgctaatgatacccacatggggtctgagccttggcatagattcctgggcaattttttttccttcttatttaatgaccaacacagatctcctcctcctcctcatctcatagctttgcattttatcaagagaaggataatgaatgcacaactattgatttccaaggaatttccgcccccagggacagggagtctatcatgtggatcagagacacatttctttccctcattaattaattttctcctcctcctttggcaggcctcacttcccgtttcctttggcagcgcccttttcccgacctaagggagcagaccttcgttggttggcgtgaggactggcgggagaggttttgtgccaggatccgcactgtctggggtgaacgctcctcacctttgacctgaaccgccaacttcccatcctccacttttggagagcgcgcctgatagctgctgcccacctgggcactgacatcctccttccgaccgggtgcggagaaagttagtatttgactccgcagccactactcgccccaccttctcacctccgaggggttgaacccgagttgtctgttggggtttagggactcaggatcgggtctgagggacttcgacataagtgcgtggcggtagtgggtatacaggggaggggggccgggcccctcgctccttctggaaaccgggccccacttgcaggcccggccaccttgggttctggtggccgaagccggagctgtgtttctcgcagactcggggagctacattgtgcgtaggcaattgtttagtttgaaaggaggcacatttcaccacgcagccagcgccctgcatgcaggagaagcccccagggcccagggtcggctggctttagaggccacttaggttgttttaagcacatgtgaaagggcagacagcaggggagcaggatatgggtaagatcttcgggtctcagaacaggggctgcccttgggctgtcccggcgccctgggctctgacactgaagggtggaatggaggaaggaatggagaaaggacggtggaactttcgcttcccctctgggccgccttcccagggtcatgcctgagctgctttgatcccagtgtcgcgcatcttggtccgctacctcccaggcgatagctactgggctcctcgctggcctcactgggggccatcccgggcagtggcctgccctccgaggcccgcgggacccagcccagagctgaggttggagttctccgggccacgttccgggtcgcttaggctcggagatttcccggagaccgtcgtcctccctttctgcttggcactgcggagctccctcggcctctctcctcctctggtccctaaggcccggagtggttggcggtactggggcccgtcgtcatctctgcttctaaggcattcagactgggctccagctgggaccggcagaggaggttctcaaggaaactggtgggaaatatagttttctttcgtctggtcgtttaatttaaatgcaacttcccttggggacattttcctggacgttaaccagaccaccttgagatgtcgttgatgacctagagacccagatgatgcgtcccaggaaagttcactgctgactattgtcactcttggcgttatatctatagatatagacctatgtacatatctccaccctgatctctccgtggacatgaaacccacctaccttgtgaaagccctacgggtgacacatgactactacgtctctgtcccaacaggggctgggcctcccctgcctaatagttgccaggagtttcgcagcccaagtgaataatgtcttatggctgaacgtggccaaggactcctgtgatttaggtcccaggaggagcagagacgtccccgccccgcctgggccctgccgcattcaaagctggaagaaggcgctgatcagagaaggggcttccaggtcctgggttagaacaacaacaaacaaacgaaactccacaacagacacgcctgcccatgaccccacgcaaggacataggaagttctgtcgccttcctgctccgcggatagccgcctgccgtctgctgccaccagaacgcacggacgctcggggtggaggtagtcaatgggcagcaggggacccccagcccccacaagcgcggctccgaggacctggaagcgggtgcctgtcgctctccgcaggctccgctctgcctccaggagcaagatccccaaaagggtctggaagctgtggagaaaaccgcaaggacgcgagtccaaacccgagagtgcggagctgggtcctgtcacccggctccaacgctcgccggcgccgccgccagccgcccctccttcccgccgcccgcacaaatcaaagccccttgcgagggactgggaaatagttgccttgtcatgtaacacattgccctgatttattataaaattttaacgaaatcatgcatattttaacagcctttaatcactgcatgaaaatttaattcatgaactgtagcgcgtttaaataaatgaagtgttaattcattaggattaattaatttgttaaaggattgtgtgcaaggttaaggtggaaagaaaactctttgttggtttcgcgtcttaatcgccaggtttcacgagtaataataaaatgaaaggaaaccgcagggcgggccgttcgggtggagcttgggcgggaccagcccggagcgcccccgagaaagtgggaaaatcgggctggaagggctagggcgcgtctgtcttcccgagactggggagtgggggtccggtgggggctagaggggaagggaagagcgggcaccggcggcgggaatccgagaaggccgagttcgctgtaatcccagggacagaagagggctcagagccgaggctggcgggccggaccccatctccccaacccgaacacaaagatgacccggtgggttaggcgaggtcgccccttcctgccctcaaaaggtcaagtctcgtcttaatggacagatgatgggccagctcgccaccgcctaaacgttccagcgcccagggagccactgtctcgccatcaggccgccggctcaggaggttggggcaagcccaagagcctctggggactccgagaggaggcggagcaaagccaaacgtgtaaacccaggctggagcaatccgggaaaacttttttcaaataggagccctgatgttaaggaatggtttcttcagcacctcttctgagacacaggctaaataggcgtatccttcagcacagcccgacacacaggagaggtgtcctcttctgcgcagaactcttattcacccttcaagacccagtacgagtaacaggtctgtgaagacgccagactttctcactgctccacgctatccccaacaggggcatttttctactcacaaataatgtaagtatcaaaatgcattagaattgcatcctcccacctcccagtaagtctcagtaaagggccaagccatatctcttgggaaaaggatctttatatccccaaattacaaacgtcacataaggcccacacttctacacaccaataagctaacatttattagagaaggtctgctccttattaagacacaacacttagaatctaggataatgacaagaaaaagacatagcaggcctaagaatctgccttgtttctgaagtggagctgcaactcaaggcattctagactgtctcagtcatataaaactgaagatcgccctaacttgcactccaggtgggttctgtaaagaaatctgcatcttcacagatgcttcctagctgactggggttccgagaattaggcaataaatgttcactgtgcactcagatcattgcttaaaaggttttctctgccaagtattattaaaaggatcaggttacatcgtgataggccaaagctgtgttgtaggactcccacaaatgggaatgaaagaacttcttatgaggctctgggaaacccttctaatctaataaagtacatcccataaacagttaatctcagtttgattctctctacaaataccatccaaaggcacaaaagggggagaaatctagtgtatgtatttcactttgaatcattgaaaaccattcaagtagaaacaagaagttcctgaaacatcatagactcaagaccaagttgtctttttcagtagtcttttcaaaccaatgtagatggccaagagatgattgggaaacaaagccgacttgaaattaaaggactgtaaactactgtaccatgttctttttttgtgtgtcagctaactccataaaacaggaaaaagacttggcatttttggatggaatgattttaaaaataaaagatgaatactaagtcatgaccaaaaaacaaacaaaactgctagcatcctgtcacattcccatagccaaagcattttaagcagtcaaaagatatttttctaaaaacatgaactgtctgcttccttatcatgagtacatctttttctatcatagccttagtgaaattaaccaagacaggaaggttaacttaatctaaatgtcagagtcagtgtgaatctattaagtggcacacacacaactcccaccgttgagcttctgtttagtagtcagactcaggaactaaatgctactgtaaaagaaacatgctaagcccaagaggtcaaggctgaaatgagctgtgttcgcaccactacactccagcttaagagcgagaccctgtctcaaatgtaaaaataaaaaataaacatgttaatacttccaaaatactttaaaaataattcttggaaagtttcaaagccctttgtcctttagtctataaatatgaattctttattacacaagggagaagagcagaagctctagagccacagacccagctccaagatatggttcatatctattccagctgtgttattactctttctcgatttgtttttctgtaaactggggacgacagtacttggttcacaaagttttaagaagggattagatgaaataaggaattagatgaaatagaggttaacttagcaagatacttagttttagtataagatagggttgttttttgtttgtttttgcctggagtgtgtgtacataatagatacatttaaaaatctatgaaaccaccatatttaccatgacatcacattatggtaaagtggtaaagagtacaaatgagaatgtgtgattaaaataaaatcctacacagattagaccctttaaataaatggcacacatttaatacatggaatactgttttagggagaatggagggatgtttctgaatataagcagtgggaaaataccttagtccaacatagatgctttcacctaggttagtcattagtaaatcaggttacacactccagatatccatgtcacagtgtcagtgtgtatttggactaaaaagacacatccttgattacagatagaagtacaatgaggcttaccccttgtcttcatccatctgtactgccatgatgaaatgttttggactaatttttaaacaatacaattttatttctcattgttctgggaggtccaagatcaaggcaccagcagattctggtgaggtctcagtatctgcttcaaagatgctaccttctagctgtgtcctcctcacatggcggaagaagcaaggaaactaccccaggcatttttttttttttttttttttgcaaccttgctctgtcacccaggctggagtgcagtggtgcgatctcggctcactgcaacctccgcctcctgggttggagccattctcctgcctcagcctcccaagtagctgagattacaggcgtccgccaccacgcccagctaattttttgtatttttagtagagatggcatttcactgtgttagccaggacggtctcgatctcctgacctcgtgatccgcctgccacggcatcccaaaatgctgggatttcaggcgttgagtcactgtgcctggcacccaggccttttttataagggcactaatcccattcagagaaagcaaagccctcatgacctaatcacctaccaaaggccccacctcttagtactattaccttgggtgttacaacatgtgaatttggaggaacacagatttagatcataccacccctaaatttaacctgtggcagaaaaattttaatttctatatttgagtttctaacgtgtagtcatattatcaaagacatttaaagtgccaatagctctgaatgtatccattagctttaacatatcagaaaaatgattggaaaatatgtaacataaaacaaaattctgctttaaattagctctttctggcttttttttttttttttttttttttttgagacagagttttgctcctgttgcccagactggagcgcagtggcattatctcggctcaccgcaacctccgcctcctgggttcaagcgattctcctgtctcagcctcccaagtaactaggattacagtcatgtgccaccatgcctggctaattttgtatttttagtagatgggggtttctccgtgttggtcaggctggtctcgaacttccgacctcaggtgatcggcccgcctccgcctcccaaagtgcttggattataggcatgagccacagcgccggcctctggctattacttctataagtggaggacatgattcttcaaattacaaatgtgaattgtcacttttatggtttcattgaatcctcagtctattataacaagggtcggcaaacttttttgtaaaagaccagatagtaaatattttagatgttgtaggtaatatgtaaacaaatgagtgtaactgtgttcaagtaactttatttagaaacaatgaaatgtgactttaatataattttcctgtgttatgcaataatctatggatttttaaaaaccttctacaactgtaaattccattttttgctcacaggcctttcaagggagatttttaaaaaagattaaaatgcataaaactgaattttatgattggccaggtgtggtggctcagcacttttggaggctgaggcaggaggatcacttgggcctgggaattcagtaccagcctgggcaacataatgagacgctgtctctgcaaaaactaaaaaatcagcctgacatggtgcatgcctgtagtcccagatctgtgggagactgagtggggaggatggcttgagcccagcccacccgaggctgcagtgggccataactgtaccactgcactccagcctgggaaatagccgcagaccagatttggtccatgaaccatagtttttcaatgtattataaaatcaattaagaaatggtagttttttgtaatcccagcactttgggaagccaaggaaggagaatcacctgaggtcaggagttcgagaccaacctggccaacatggcgaaaccctgtctctattagtaaagtacaaagattagctgggtgtggtggcaggtgcctgtaatcccagctactcaggaggctgaggcaggagaattgcttgaacctgagaggcagaggttgcagtgagcagagatcgcgccactgcactccagcctaggcgacaagattgagactccgtctcaaaaaaaaaaaaaagtagtttttcctggtctttataggctaattcaatatacgagacaaagaatcatcatcgacatcaaggaacacagtgcttatgacattctttattcaattcacatagaaaagcatgcagtattaatgtaaaacagtacaatattaatgtaaaatgttcagtgcacattaaacagcatacatacccatttttaaagacctatataggcataccaaatacgtttagaacaatacactttttcagagcctaaattaaaaattgtgcttacctcttacctatcttcaccccctcaacactcttcacagaaaagttttgtcctacataaaagatattctatcagccaactgaaacctctttttcttaagtatggaaaacacagcaagcaaaaatgctaccatgcatagtttccacaaagaacaggaacatgcaaacaagaaacatactactcaaaagaaaactcccctggaatgcaagtggatcaagaacttggcgatgagctctttcaaacctgttacatctggaacaatgaagctatgatgttttaggttcctctaaacccaagtgctccatgccttctttccatagtatgctaaatttctgattttacacacatacacacacacgcagaggagaaaatgtaagctacctaacataaaacaaatgtcttcatatagaaaatgttttctttcatactagcagaacattttcacaaaactggacaaaacacaatgctaaaaaatgcaaacatatacataaaacctaaaaaaagaaagtaaatcaatattggactaaggctagagtgctatttctccatcatggccctgcagaaaaactaggccatcactaaacataaataaaaagggacaggtaaaataatttccaccctgggaaaagcttaaactcaagtgtcttattgagcagtgtatagacaacactaaaagttttatttaagaaatccaagttctgaagacaagtggggcttatcaacaggccactgtatctaacagttaaataacattttttaaaaaaacaatgtatatccaaccgagatacatatcaaattcagtaaaaaaacaaaaccaaaaacaaaaccaaccaaccaaccaaccccaaaacacaaaaataacctcctccctaacttctctggtcacaaagactcccaaataaaaatgaaaagaacaaagtcttttcaaaatgaacaataagtattctgggtacaggttaatccaccatcctgacttgatacttgactaaagattatcaattccaatttgtatagaacttttatgaggaaaaaaggtaactttaacaacttttctatttctctcaggacaaaaccacaaatgacacctttctaatgagtcaacttttagttgcttttgatgggctggcactggaaaggctgctctggatttttctttttgttgattgattcacatttttattcctcttttcaggcacaaaggaagtagaccaaggagactgaaggtggttatgaagactgtgcatctctgaggacatcttaaacaaagatgacccaaatctttgatcttcaaatagtcgatgtgaactgcttaacaaaatgccctgggaaaactctgtctgaaacaagcagcttgggggtttgatttcattagttactggacaagaactggaatggagtgaaaaatcttcattcatttcttggtcagatggagagaggagaaaaaaagaagtgggtttccattcacttccattttctaactgatcattagttagagaacctttggaaaggtttagctcagttttttcttccaacttatcaggttcctcaagaaattcactgccttgagatgactttgataacccatccaaatccagtgacttaaaaccgttattacaagggctcttgctgttgtctgactctgacatcattgaatccaactcagagattttgtcaaggtaagcagcatccatcgatgcttcactggatgttcttgtccggttcatttcaaaagagcgaatagaattcaaccttttggataaacataagcctgatttctcactcaattttgaagatatttctccaacagaatttgctatcgtgttcccctctgaactttcaaaatctaagttttgggcatagcttgtggaacaacagtcccaaaatcctgtctttggggaagaaaaacattctgatttcttttcattttcacttctacttatatcatcttctgaagaatctttattagaaacatttgaagaatcacaaaaatcatcaaacaccaattttctgagatggtttgagtgctttttggaacctcctgcttggaccacagagctctctctattttctggagtactgagctgaaggcaactaagggacaaaggagtacaaggagctggaagatcataaagttcttcatctttgtagggtacacagtcacttggtttattcccccattctctttccaaataagtatccatacttgtatctgtcacatctaacattacttctacctgttcttgatataggtctttgttcttagaacagttaaggtctgctttgctggtactttcctgccttgcagaactggtgtcacacagtctgctgctggaaggcttcgctaggtgagaagaactggaggtggatgagccaggctgctttctggcactatcgccttgattctttgacaccacatcctcctcactgcctttgctccctttgccatctgcagaaagtgctgtctggcaaatggaattcatagcttctttctcttcacttgaattttttagctgtgcaacttgagattctagttcctctatatacttatcacttcgttccagggctttcttgaggcgattggtttcacgctcatactgttctactttggactgaagagcagcaactgcaaaccttccaaacctacaaagaatggaaagatagttaatcttataactcaagcttttttcttttcaaggtttgagagtgcaaactgtcccaggctattctaatttcacctaacagtgacatttcagaccactcaatgagtagggcaaatgccagatgtatattttcaaaaaatggtttccccacttacataataataaacatatgataataatagcaaaacctaataggatatttttgtggttaaatcagatctatggtagcagagaggcagaaatgtgctgatgatttcccctcgaagagctggctgtatcaattcagctcatatatgcatgaagagttatcccctaaaacaatggcaaagatttatgataacatttgaacagtggtctacatcttgaaatatttacattcaatcattttcctatcatacagcagtgttttacaatacatttcttatataatgtcaccttgtcaaacataaaatgccaatttgaaattcagaaatcttagcagtcccaggaggggtggttttaaatacttatttgggccctttcaattatagccacccttgatctgaagcttttctgtggcttttcagagcactggcctttaatttatgtcagcactacttatttttggcattttacagctgtgtgggacatctatctcatttctttcaactttgaaatatgaagtcagtgcttgtgattccaatatactaggcaaaaaaaaaaatttttttgtacactttctgaaagagaacattttggagagtgactgaaaaagaattcccttattcacaaaaagtctactccttttacaccgggattatcttgctgttatttccaccaagaatgagtactgtgttaagctcaggaaacaatttttgagtacctagtataggttaggtggtatatttggggctgggaacacaaaagataaaaaagactgtctagctccaagggacataaaatatctaccttaaattcaatcttatcaccaaaaataaattctatctttcaggaaacttatgagccaataaataacataatcccgtgaaaaataccttatctcctccaaaattcttttcaaagcctattcttaatcatctttttgatgatttatatattggcccatttctaagaattaagggattgtctgtttggaggaagctatgagaaggtgactttcaaaaattatttttatctttgggtttatctttttcttccttttttcccctaatttgaaaaataattacaattaagaacatgtatttagtattgaaaaaaaaaactacaaaaaaagcagaagccaatagcaattgcccctcttagaatcaaccacaacatgttttcaactcccacttaatgcccatcacctcctaaaccactagcccaattcattccccatctcaacccctacataatccctgcactcttatcactgaaggaaaaagcagaggcaaaggtaaatatagaatcataaaatctcaagattagaaagggctttaaaagacatgattgctgaatattgatttactcactgcaattaactgaacccccagagagagcacgctcccttcaacttctaaaaaaacacagcaaaaaccacaggtataacaaaaacaaaagcaactataataacaagcctccccattttaaagacaaagtttactactgtatttggttaaatgaatgatgggaatttttcttctt

SEQ ID NO: 417 - DNA, 48941 bp, Homo sapiens
  source 1..48941: mol_type = genomic DNA
catatcaccaggaatgccactgcttaaactcgtctgaggctgggaagcccacccagaccaacaggcgggccctctggcttccctggagggagctctgtccccagcactcagagaacagagtccccacagcaaaggccctcagggtgcaacggccgtgtcggagggccccttcccatcttctcttcttcagcacatgtgcccagctcctgcacccaatgcccaggggatgcctcccagatgccagcagcatggtgacaggggcaggaggtggcattgtccttgttctggatatccctgggtgaccccggtacgtgactcccctgaactccagcggcctcatctgtgacacagggggccgggccacatcatcctgggcagtgctgctctctgcaattattgagtctggagtctcttcttgtcagagattctctttagggagtttattttccatagactaaagactaaacaatagagaacagagagaggcttctagatacctactgcaaccttagcttctcagaaaatacaggtgcttgggactcttccacaaaatcaggaatttaaatggaaaacgtgggccccaagacagctcctttagtcaacgggtctgagtacacattaaaggagggtggagggagaggggacatagagagggaggaaaggggaggagggcaccaggaagggcggagccaagggagtcctgggggtggatacgcacctgcctgtaaggggccctgtggtcctggcacgtgcctataagaggccctgtcatcgtgtgttaggttgtgacacagctctgccctccccaggtgccttttctgaaccaggaacctaagaggagctctcccaccagggccagggaaggagggcaccaggacgggcagagccaagggggttctggaagtccccggccctggtgggagagctcctctcttaggttcctggttcagaaaaggcacctggggagggcagagctgtgtcacaacctaacacacgatgacagggccccttacaggcacgtcgtatccacccccaggagcacacagacagactctcgtccacatgccctgtctggggacaggagcccagcacccaatgcttgttcctgcttccacccctttgctgacctccccactcatcagggctgcgtgccaggtgaccagggttctaaccctggcttcctccctgacccctcctcctggaaacatccttcctgacccagcctcagtttacctcattgaagggtgaattttaaggacccattcagcttttatctcctgtcactccatagacatcaagacttaacatcccatccctcccactcccagctgtcattccccccccccaatcttcggcccactccctgtccaggggcccaggtccccagcgcgggcaacccctctgtccccattcccgggacctggagcccgcgagggctcaggccggccaggatggagttctctatcccagttcaatttcccccgcctttttgatgtcacatcctgtcccagcctgcttccccgccggccgccgccctcctccccgggagagagcgaggcgcgcgggtccctctgcgccacccccgcccccgccccttccgagcaaacttttggcacccaccgcagcccagcgcgcgttcgtgctccgcagggcgcgcctctctccgccaatgccaggcgcgcgggggagccattaggaggcgaggagagaggagggcgcagctcccgcccagcccagccctgcccagccctgcccggaggcagacgcgccggaaccgggacgcgataaatatgcagagcggaggcttcgcgcagcagagcccgcgcgccgcccgctccgggtgctgaatccaggcgtggggacacgagccaggcgccgccgccggagccagcggagccggggccagagccggagcgcgtccgcgtccacgcagccgccggccggccagcacccagggccctgcatgccaggtcgttggaggtggcagcgagacatgcacccggcccggaagctcctcagcctcctcttcctcatcctgatgggcactgaactcactcaagtacgtgcatccaacgccattttcctccctgccaggcgcccggcccggcccctcgggagccccacaaagtccgggaacggctctggctccgcgccgccccgcgcccccggcctgggcgcccgaagtgccggggttggggagggggccagggcgctaggctggacctgggtgggagggaggggtgcaggctgaccggagacggcgctcctccagccccggctcagcagagctgacagctgccccctttttcctaggactccgctgcccccgactccctgctgagaagttcaaagggcagcacgagggggtctttggctgctattgtcatctggagggggaagagtgagagccggatagccaagaccccaggcattttcagaggtggcgggaccttagtcctacccccaacacacacccctgagtggctcatcctccctttgggcataacgctgcccttgggggctccagaaacaggcggtggggattgtgccgctgagacctggaagggcagccagcgtgccggccagctgtgtgcattgctggcttaatatgcagggcttggggggctgtggccacatgcccggcaggaggtgagtgaggagccctgtggcgtgctggtgtggggatcgtgggcatttcaaacgggcttgtcgtaccctgaacaatgtatcaatagagaaaggtctctgcttggtattctccattttaaagatgcatattggagctggcaggtcttgggggaggagaagggctgtctgtgagcgccgaactgggagggttgctttggcactatggtgctcggaagagcctgccagccgagggagccgggctgcttgggagtgacattaaaatgccctttcaatgatgccactgtgccacgctctgaactgggagactctggccctttggagttgcaagtccaggaagtgatgggcagccagtaccttggccccaagccccagctgcccctgacccttctttccttcctcccttcctccatctccctcagaataaaagagaaaacaaagcagagaagatgggagggccagagagcgagaggaagaccacaggagagaagacactgaacgagcttcccttgttttgcctggaagcccacgctggctccctggctctgcccaggatgtgcagtccaaatcccaatccagcagtggggttatgtcgtcccgcttaccctcagagcccttctcctggtgctgcccagacgatcagccagtccctcctggagaggttctgcatggcctctaggagaggttttcttggccccaggaaggcctggtggagggtggtggttgtgcactgttgctggacagatgcattcattcatgtgcacacacacacacacacatgcacacacaggggagcagatacctgcagagaagagccaaccaggtcctgattagtggcaagctgccccacaaagggctatgcctgtgtcttattgagacaccttggcaaagagatggctgattctgggtggtcctggacatggccgcacccaagggccctccaagccttaatggcaccctgaagcctccatgcccaggccaaaagatgcttttcctccctaagttctcctctttgtgtctttttaaagattccctgttctggggagaaacttttggttcaacttcaattagaagccttgtctcagtggtgaaagtatttgtccatccacacgaagggtgctggacatccgaaccccagccagcccctggtcacacccctgcatcctcacaccttagagtcagggcccagccagccaccttcaggaccctggtcagctccgccagcccacagcctccgcgggtcaggaagggaaatgctgctgttttctttgctggcctggcatgttcctctctctgaagctgaaccacaggctgtctcaggggaatgtgtcccttgactcagccaggaggcacctcccaccctcatggtacagctccaccttccccaggctggcttctgataattgtgctttcggaatcttgcattggaggccagttatcctaatgtgttgggattttggaaaaaagcctcagcaggtgaaatcacgtcaacgtttctgagtctctgaagggggcagagagtggctggctcagcaccagcacccgagagcctggctaccctagtccccacctgggtgggccccactggggttatgccaggtgactttcatctttgacctctaagatggcatctggggtcgggaatgggtgtgggggcaggaccagcctgctctgattccaagagctactgggggacatccatccccaagcatcttactttcttgattccaaagttatgcgttgcgggttccctgagcaatgctgctcatatttgtgagtgagtgaagaagcatgtctgggcttcaggatagggtgctggagctgcctggtgtctgcctcccgcttccactgtaggtaaattgctccaacagccacatccttgcttttagctccttccaagggatggacatgcgattctagggccactgtgtttctaaatgagcatacgtcgacataagaagatgtcagaaacgcctggatcctacctgcacttaagaaatgctgcctggaggattcaggcggacaggcagggggagtggagcacatggcggggccatctgttctcccgacagcttacttacgatgagacactcaatcaaacaccaaccgttgatggatggcctacgacacgcaaggctgtggggccaggtgaactttgtcctcagacagaaagacatttcacatggtcttgctctgtgattttcaacaaaagactggtatttcatgctcttagagaagcagggtaaagtggcatggtactgagcttccggggcagggtccagaggcattgatctctgggccttggggaaggtggggcagggcagggactccctgggctccaggcccaccgccacaccccccaggcttcccttcagagtgaagaatgttttttgtacgtgatagggtaaaaggggctgggaagctttgtagcaacaaccttgaacccagatggcctcattctcaccccgatcccaccagacactggctgtgtgaccttgagaaaggccctttaacccctctgagcctgaccttccttgtttcacaaggaggattaaacaagatgattcttgagtaaaatcccttcctgctacagacccccaaccccattctttccttggctcactcatcctctccttagacaagcatttcctgggtaccagctggttagatttaactcggtcaattctgggcttacaatgttaagtgagtccaaacccttgccgcttggcacctggggccggcttgctttgagggaagaccccaggctctgccataatcatgtgtttcagtggcaaaagaagtgtctgcaccgagtgctctgggtaggagttggggagtgagttctgttttggaagctggaggcagctctggagaaggaggatatttgatctgggtccaggcttgcacctgggtccactagtgagcccgggggaaagaagaagaggacagaggctgggtacggtggctcatacctttaaggccagcactttgatcacttgaggtcaggagttcaaaaccagcccggccaacatgaagaaaccccatttctactaaaaatacaaaaaatgagcagggcgtggtggcagacgcctataatcccagctactcaggagactgagggaggagaatcacttgaacccaggaggcagaggttgcagtgagccgagactgcaccactgcactccagcctgggcgacagagcgagattctgtctcaaaaaaaagaagaagaagaggacagaaatggctgcagacagaggctgcagcaggaagaagggcctggaaaccctgactctcacatccaatgctcaatccacgtgggttgagggtatttgaagtgtttgaagatggaagcggagctctcctcattagccacgcatccccaggccgggcctggcctttcctaaaacatgacacccctggatgcccctggtggggttcaagctgtcagtgaacacagaacaggcttgagtggcaaccgtcactgtgactgtttgccttcaggttttattgagtgactactgtttgctgggtctcggagttgggccagctgtttgccagtctaggtgcctgcattgagaagtgggcagacccgggactgcacttggggagttgtgggttggtgtgaacagggcagacgagaagaccagggaggtgatgctgacttaggctttcagagaaccccagtgaggcccatccctctgaatctgttcctcatccccccatttagctcattctagagctgaagacctcacttcactgccctgagcaaatccaacaagtagaaacggctaaacacttttacctgctgcaacctaagcttgggccaggtggtctggatgagctgtcttgtccccctgccaggccctcttcccctccagcttctctgccccctctgttttggacttgctgggaggatacagtgtttgtagaaggggatggagtgcacgggtagggggaagagttcaggtgaaattggggtcttttcctaaacccattatttcagaatacgtggaattcattcagtctttgcaccaaagttggctgtggcctctcaggctggcaatgcctctggacacacggagggagaggggcaccctcccctttcccattcccgggctgcctcccctggtggagaggctcctgacaccaggggcgctgagctgtcaatcctgcccatgagacagctgctccgtctcctaaagcaatttgcttctcattccactgacttcaaccttccccaatcagaagaaaggtaatttcctgccttgggttgtatttattactaaagttatcaggccctgtaatcagtattaacatcaccgtgtaaagtaatacaaaactaattactagctaaactgaattagatacatggcaaccacgagctaggctgacagggcgagcagccaatttccagctctgaaagattcgtcctggacaccctgcacgctcggaaacctcagcgctgtcccgactggcaccgcagggcgaccgaagggaggggaagagagaacaggaagtaaaaatgcacacctctgagtttttttagattattaaaataataatctaaatattataaataataatgatagtaaataatatactatataagataaataatgtaagaaactggagcccgcccggagttaaagccccaggaatcccgccagtggcgaggactgataccgcatgtcacgagtgtaaactttatcatgttgcggcggtcccagcaatcctgggcagttgtccccattcttgacctgaggacacacaggcgtggggaggttaagcagcctgcccatccacccagcacatatgtgatgaccccagatggtgctctaggtctgtctgacatctgagaaacctaagttctggtgcttgttaagacagaaagaaaatgcaaagtcgaaaaacagcgcagtgtcaccgaacaccagtgcaaaggaggtgctggtgctgctgccgggtcgccgacctctgtggaatgcaccacagagcccatcagctgtgcctttccgactgtgtggacacgtgcacggccggctgctgaccttgaaaacgggcttttgaaggagaaagcagggcaagaaggagggggtccacttgtggtttccttgcaacccctgaggatcaaagaccccagcaggcccgtccaccccttggaaacggggatgcatctaggagtgcctgcccagctgcctcagttctctggagtgtaaggttaggggttacgtaggcagccctgtgcccgttaaatgtctcagcatgtgcatgacaacttgagatccaagaagtcagaattaggggccaggcgcactggctcatgcctgtgatcccagcactttgagaggccgaggcaggtggatcacttgaggtcaggagttcgaggccaagaagtaagaaataggatctacaggtcctgagctaaggtggcctctcagtgaggctctaaactgcccgacacgtgcacccgacacgcctgcgggtccggtgaccccctttgttgcacctggcatgctttgcacaaggtggctggaggggctgccatggagagaatccgctgcgttcgaactgacccgtcctcgtgtgtggctgctcacctggagaaggtttcctgtccctgcttcttctgtgctcgtgtcaaagctcacgcccctgcctgggctccagctggtgatggcagctgcagtgttagcagacctgctcgccccaaaaggacatcccagcagcagggatcttgcccgtatattccttatgcatggttcaatgacagttaaaatctgattggagagtgtgtagccatgaaaagttgagatgaaagagtgtaagggggagatgggaatgaggtcggctccccagcccttgtccacattcagatcagcagttcacagcatcgctttgggccgtccctaaagtggttccattccagctagtggttttaggtatacaagttgtcttcggggagtttaaaccctgccgcggggatttccctaccatacaaaatggctctcctgagtggtgctgaaaagaaagtctcccccacttgcttctggtgatgcttcgggggcctaagagtcaaagaaagaacatgagtgtatcgtaaataactttactccatgcactgaaggatgtggtttttgacagtgcagtgggactcagaaatggggagccagccatttaccaacaatttggctgtcaacttgagtccttgaacccctgcccagcctccttcccagccccaaatatgcacacacaggtttccgttcccaggccactcagcctcagcatcttgtcccacagatgcacagactgagtcagctctgagtggcagcaggtgaggggtgttgacggacccaggggtgctttgttccatcagcaatacaaaggatgatgaaacaggagattctcccaggggctgcagcagtcttggtgagaggtggctaagaacgtttccgaggccaagtccaggctccacagggcaggccccatcagtaatgcccgggagcctcctgtgcagaggccgggtgtcgtctggatgcaaagaactttgtttggaatctggcagcaccaaatccttggctgtaagcaaatggtgccacctggggcattttccacattcccagctggaccctgggattgactctttgatgtttctcatcatgatgtcacctttgaattcatgtcaggatcaatgactgattccacagaaaccgggctgcctttcccaattagttacggtgagtttcctcacctgggaagtaggaaatgattatgtttgtggggtccctgaaaaacgtgcattcagcccagagggtgacgtgtctgctgaattgtcttgtccctgttcttcaaagtaccactcccagaattggcctcttttccattcggcaactaagggaatacagagctgtggcttcccttggcctggctgtggccaggctgagacgatatccatgaaagaggcgtggaacctgccagggagagtgcggagggtgcatgaagggtctggggggatgggggccgtggacaagtcagctctctggatggacaaggaactaggactgaagagctggacacgaggccaactgctgaatggaggaaacgtcccccagcaacagccatgggtctgtgggatgctctccccagggcaagtagctccccatcactgtcactgggggacttgaagagctgacactgagggaaagggggaaggacgatacctcggaggaagttgaatctcctgggtcggcagctcaggccagccgtgctcacaaaccccaagcacagtggctcatgatggcaacggtgtgcatagggcacaggctgcctgggggcacctctggctcacatgtcctgtcattcgagggccctgggcaagggaggggccctctctggatctgttttcctcatgacagaggcagagagacagggtgtgactgagacatttggctctgaaagctgctcagtcgtggcccttagccgttctccctcccggggccaaaatcgcaggtcacacagccacgcctgatgcaggtggtgtttgggagactgtcagcttatgggaggtgctgccaggcacagggagccgggccaggatggaaatcctctccagggaagggggtgaggagcagttacgcctccacccatgtgtgaacccagaggcctcagaggaggggagtacagggaacacttggctcagaagacccatgctggtcttctgtggctgccgagagggagtgcccaggggacctgtggctcctcccattctgcctggcttgaggccaggtcctttccttgctcctggaatgttccagcacagaaagggaatgaaaaagctacatacaacgtagaaaaaggagaggtggctccatgtgggacctctctctgtgtctcttctctctctgtgtcactctatctttcttctctctctctcttctctctctgtctctcatctctctctctgtctctcctctctccgtctcttctctctctcctctctgtctctattatctctcctctctgtctctcttctgtctctcctctctgtctctattatctctcctctctgtctctcttctctctgtctctcctctctctgtttctcctctcttctctctcctctctctctgtctctctctccatttctttgtcttcctctctgtctcctctctgtttctttgtctttctgtctctctgcctttgtctctctctctctctcttcttctccccttctccctccctttcttcctcccctccccttgtttcccttcaagatatttgccaatagcctgaggagagtatgcgtatttttaaacagcaaccgggcatccaaactttgtcccttgagggcatcctttgccaaggagcatcgggaagtggcccagagacctgcttccctccaagcagccactcctggctctgggacctgagtaggtttgcatcctgcggacctcactgttctgactgtgggtgtcagtggtcgtctgactgtgggtgttggtgtcgtctgtgccctatcagctcaccatgtggctgtcctagggcttctcgaggtgattccccaatagcccacgtgtgtccgcctcttgtaaggtctatagcaagctgggcaggagcaccctctcacacttgcgtcttctgagctctgaagccgggagatgcagagggggtgtgcttgtttttatgtgtgttgatgaatttgtacagagtccaccaaggtcaaggcctgtagggggctggcatgaggatagagacgtggctgttctaacctgtcatgacagggagggtggtgcaggctcgtgccaggactcagaaaggggtgggcaacctcctgtccttcccacgagcgtggaaggcaagggcccatgaaatgtcttctggcggcctctgtggctcgtggaactgtgcggacagccagggctgctgtggccatgcaactcatgccacttctggggctcgtgagatttaactatggccatgacatttataagacgaggatgccaccatgtgtatgggcttagccctggaaataggctgtcaccatatgaccttggacaggtcttatcatctttctaggcctgagattcctcatctatacagtggagtcaatgccaccacaccatgcacttcagtaaggattgggtgccaggcatggcaaagccccagtgccaccaggggcgcagcacctgccccatcagcatccgtatgattgttcagagctgcaggtgtgatgagccctggctttaagagaagtcgtgaagaaattgggattgaaagtcctctttaggaacacttggtattgcctggcgccatggatcccctaatccaaatgccttcattcttcaacgatccatactttccttctggaatgctccatggccttctaaatccaattacacttactcaagccttatctgacgaccctttcaaaaccattatgcccactgaatcacagattttagaaactggacaggacagtttggagcaggtgcaggttggagccgctcaggtgcaggttggagccgctcaggtgcaggttagagcagtccaagtgcaggttaatcttttacttcgttaaataaataaatgtctatggcttctgagatggcctgacagttttgtggattggattgggttgcatttgaatttgttcccgcagaacaagtggtccttgtccttccgcagcgggaagcggcgtgagtgatctggacagacacggcttgtggccttgaatcggtgttaaacatgcatggccagaggaggggggcgaagccagcccaaccggacttgtgtctccgcctgggcccagtctgtgagccgggcctgcagtcccagcttacactgggagatggcgcccttccccaacagttggaatttcctggcatccgacccagcccggctgcctgagattacagcattaatcagaaaagcagatctgaggggctcatttaactagcgggtctcacacccagcactcaggccaggatcatcttggctgcagctgaagtctcttcagccgaggactgcgcacacagagagaaaagccccaggaaggcgttgttcctctcaggcgggcgccagggaggcgcgctccttccggcccggcgtccgtctttcaaatcccatccaggaagggagattaattttcgcccaggcagagaagagtgtagtgagtgatctggaggattctttccttcccaaatggctgggaaagcttaatggaaggccccggaggaagtggctttcatctccgattagaagccttctgtaaatgcaaaagccctattaacgtgtttgacccagtcaggcctgcgcttcaggtgggactgacacgcgtgagtcctgctgcggtcgccgcagagggccgggaagaggggcagcgtgcgccacttgccctgcctctgtgcctgggcgccatgactcgagcgccacccctgagtcagtaaggacaccccccaacccacacccctccaccacagaccccagtccccgccccacacacccacctccccaacaccaggttcatgggcgtggtcccttcagctcctgaggtccaggcctgagccccagaccttatgcagctcctgccgggtgtgcgccctcccagggccctcactgcgcaccgcgggccacggcagaccaccccagcccccgccttgctgtgcaggtgtcaggagtgccggttggctcccttcctcccaagcaaggccttagggcaccgcggctgccctgggatcgcaggggcgcctttagctctccaccgatgccccgacgcccccctggcgctggaggccctcgcgagtctggctgcttttcggagcctgccctgcctgctgggtttcaggcgacggcccaggctggctgggaccctcgaatcaccgcggaaaagggctccagtaggcaggacggcgccgtctctctgccggcaacctttgccccaaagcggaccctctgcggggatcggagagggatgccccggcgtgaggatgggagaagccccgggacgggagggccgcgggccgtgcccccagctggagtccccgcgccgccgccgggtattttatgatctgggggtggtggtgtgtccgtctcctcatgtcaccctgatcccaactcctgggcggactggagtttgcagacctcgctgccagcagccagggggcggcggggagccgagcgagaggaaaaatccacccatttcctgggcggattgcgtcggtcccgcccggccgagccccgcctcccggccgcggcccccgcgcgcagcccgcgcagcgctcagagccggacggcgcttcccggtggcggcggaggagcccggagggacgcagccgggcaaggcagggcgcagggcgggcggcgcgaggcgcagggcgcggcgggcagaggccacctggccaccttccctggcgcccggggaaggcgcggcgatggccggggcgcgcggggcggcggcggcggcgggcgggcggcggcgggccgagggggcgcggggacacagccaggcgcccctgcccgccgcggtgcccgccgcctgaaggccgcctgggcgcgggagccggtgccagctcggagcgggcgctggaggcagctcgaggcgcgatgtcggtgccgctgctcaagatcggggtcgtgctgagcaccatggccatgatcactaactggatgtcccagacgctgccctcgctggtgggcctcaacaccaccaagctctcggcggccggcggcgggacgctggaccgcagcaccggcgtaagtgcgcccgccggccgccttggcgcggctcctcctcctcctcctcctccccctcctcggtccggagccccgggctgggcgggcgccgcgcgggacccgagtcgcccagggaggcggcggggagcagggcgggcaagggcaggcgtcgcgggccggcgcagcggtggcgaccctgctccccgctcccccagcctgggccactccatctccgcccgcgcgcccctggggcggcgtttccttcgtctgggcccctcgccgcggggccgggggagcttggtgggttctcggaggcttggagtcctgggtcagtaatcatgagccccccattgaaaaggttaggaaactaaggctggggacttggggacttgtccaaggtcacactcagcgagtgaggggtggagccgccgctagaccctagtctgggctcggtccagcggggactgagcccgccctagtttgtaaaagccagactggccggaccgggctgggagtggggccccagccggtgggctccggagctcctgcccgcgcctgcattcccaaagtcccaaggcgccctttcctccccagtccataggagggtttgttccttctcctccgaggacggtgccgaggggcttgggtggggcccctgggagcctgcccttgggcgctcaccccctcgcctttgccttcgtcttctgcgcgcacccctccctcctggcctctgaaattgaaatcgcgtctccctctcgagcctagcgggaggggaaccgtggccggggctgcttctgggcagagctgacttagatggctgagcgaggctgagctgaaaccgccacccggagggccgcgcggggaaggggccgctgccgggaaggcgcgccccagaccactggccctttaggctgaaaggagaggtgaaggacgtgagtctccctccctctctctttttgctgccaggggtttagtgccctgcgaagagggctccgtggtgtggctccctcctaagacccctcttgaggccgccctccctgctccttcaggaatcggagggcgattcctccatgatgactttgttccggcctgccggtcccgatcttctggggttgggaatgaatgagattaaagatatgactactatagattctacccgcccaacttctcctccccatcttcatgctaaaaatagcagagagatgacctgatgccaccggaggggagcgtgctcagagacagtagggccagcagcaggatggagctgtgtaggctcaggagtgcccgccccggtacctggcagggctgggctgcaaggttagaccagacatgggcagctccggtttctttggtgatctttgggcaaacctcaggactgaggttgggggtgacccctgcacagcatgtcaccagcaatttggcgacctccaccaaatggctcgtggggggagcccacaaggagctggaaacctagtgttttctcgggtcggtctgtgccacgctgccggctgggaggttgctgtagctcggggttcatcacagctctgggcgaataggctgctggatctggggctgttacagtgggtgcttcgtctgcaagtgtcagggaacggcagggcgaggcttggtggtgccagccacccgtgcttgacttacgggaaggatatcctgtttctgaaatacgtgcccgctgcaagccacccagcgtttgctttcctgccttgctcctagtccagcctgtggcctccagttgcccctcccatccacccagcagatcaatttggccagacgacaaactccagacatcccttgagttgaacttaaattttaagaacgtaaagggtcttgcctctttgacatccttccagccctgagccccctaacaggagacctgtgcctctttgttcccagggaccctttcttccctttgggtcaaacatgtcttgggaccatttcctcccatcttttccttgggggtggatgtggacagtttcccctggttgttggctctgatacacaacctcatggtctccctttctctccttccctctcccttcccgccccgcccctctccaggtgctgcccaccaaccctgaggagagctggcaggtgtacagctctgcccaggacagcgagggcaggtgtatctgcacagtggtcgctccacagcagaccatgtgttcacgggatgcccgcacaaaacagctgaggcagctactggagaaggtgagtctgcgcagagtgtgtgagtttgtatgtgtgtgtgtttgtgtgtgtgtgtgtgtgtgtacatgcctgtgtgctcacaccagcaccaaggcttggctagcttgcaggccccattttgactctttcctggtttgtctccactcaaaatatttgtgaatgagtgaaagggtggatggacggatgggtggatgggtgggtggatggatggacggatgggtggatgggtgggtggacacacaggtggattgagacttccaagggtggtccaggaagagaggactagacctgccccctgtcaccacaggctccactgagaagtcacatgggcatggtgagacgggacacaaggctcgtctctgagtgatgtcataatctgtgtgcacagggctggggctgtcacccagcagctaccttggagagcgcccataggcccaggaatgcatggccatttggattttacgagatgagatcttttttctgcccttgaatggttgtacctggccagtggctggacaggtgctcatcaccatgaatgccttcctggggctaaagcaggccatgctgtcaccttcagaaccacatgggaacagcaggtttgcatatgtcgtttgcataacatattttgaatccgttatttcacttaatcttcacaagaaccatgtgaagttggtgagatttttcactccagttcaagaaaaggaaatttggctcccaaggggtggacttatttgtcccaagccaaacagctgttagtagggaagtgggcactcggacccacatggccgagctcatcacctggttcagtctcctccactccccactttagtcagggggccttctcctaatgggcacagcccaccagccttttggcacattccacccaaggaccccgtattctgtggttaacctgggttctgggggccccataggagagttaccaagggaacaaggaggaatggtgggcccttctgttccacccattgattccccagaagaaaggtgcatttgcatgtagtgcctatgggcagggaactttcccaccctgagggagtggggtcacaccacacacacgcacactcacaaacacactcacacatagtcacacacacactcacacacagtcacacacattcacacatagtcacacacacattcacacagtctcacacacacatagtcacacagtcacactcacatagtcacacactcatagtcacacacacacacagtcacacactcacagtcacacactcacacatagtcacacagtcacacacactcacatagtcacacacactcacatagtcacacacacacagtcacacactcacacatagtctcacacacacacagtcacactcacacatagtcacacactcatagtcacacacacccacacatagtcacacacactcacacagtcacacacacactcacacatagtcacacagtcacacacactcacatagtcacacacactcacagtcacacacacactcacacatagtcacacacactcacacacagtcacacacacactcacacatagtcacacacacacacacatagtcacacacgttcacacacacacaatagtaaagccgtgactcttcctgcaggttggccttggactttctggaatgggcgtcagctcaggagtatggcaggaggcctgtgaggggcggggggcctctgtgactcagggctggctccgtgctggggggacagatggtgctgtcactgcccacctcgttggggaaggtgggagcagcctggtgagaggacagcattgacccgactcgggtccacattcctggtgctgaaccacaaaccctcaggaagctcgagacaaagcaagtccccttccttggagaaggagagggtgggctagaggtttcgagtgcccacccagctctgacgggccttgaaaggtccgagtcactgcctgttctgtgtcccagtccctgtctggaatggccacaggacccttgtttcttgggcaagaaggatgcatcatggtacgcagggcaactggcctagttcgtaaagcacgctcaccttgaaggaatagaatttgttttttctttagccacctgagtaaatcattttaaaagaattaaagtaagatacatttaacattccaccaacatttattaacaccaaactagaccaaagcctaactgagcctttaattattcagaagcttagatgggggaggcggcacttggaggggcctctgggctgtgggggccggcgagagtcaggaggggaaaacagagccctgagcccagggaggaggcatttgcggggagagcagagagttgggaaatggattccagaatgctccatgagcccctgggactgcaggccctggaatgttccttcctgcctgtgcgtgccacagcattactgcttaaaaatttaaagccccatttgataccatagcgggcactctattttcagagggcatgagccatttgctatgaaagagggcccttgctccttaatgcactgtgcattttagcaggaggcagcgctgctccgtcctcagcttcccccgcacaccctggcctgtgtgctattttctttctttcctctttctcttttcttctcttgctttctcttcatgggcagaagcaggacagggtgctccagaaacctcagcccatgtgccctgttgatagggctgggtcacagctgagcatattccagccaggtcggtatttctgtgccctggcttcacctttaacccacctggtgaggctgcaaggtactgagtcccaggccccacctccagagtctctgatttctgttgccctggggtccctgtggggaacccaggtatgtacagccctggaagcctcaccaggtagttccatgcagctagggtcgagcactgtagggacacagatagtggcaggcgtgtggcacgggctccgttctctttgaagaagcacttggctctgggtttgagagtgtaggctttggagccagtccagcttgaactggcaggcctcctggctgggtgacagtaagcaagttgcttaacttctctgagccttggtctccctatgtgtaaaatgggactcaaaatagtacttattcatttcccggggttttgtaaagatcaaatgagataaataacacagcagactcagtgcagtgcctggaacatgggaaaggatggataattattagctgttagttatcttgaggccaggtgtgtctttgtgtgttgctggcccccctcccgcttcttaatgcctgctgccccgttgggtagggtgtgggatagactgtcatcccgtagctctgtgaccctgagcctgccagttggctcctcagagacacatcctgcaggcaagaaaatgaaggtgctcagaggaagggctgtgctcagaggaatgccttccctagggttgggagatgggtgcgtgattgcagtcctagactgactgtgagctggaggcagacctgtgcctgtgccttgtccatggccagaaaggaaagtgcattcagggttaggagaactataggagagtaattgtttggttttaaggcagctgaatagcttggtatctttaaaatttgttttttaaatctaaagtctaatctttgaaatcttttaaaagcattccttctctggggagcaaaaagcctacagcaccgtgtgtggtctcctgactgaggccagcatgagctcagcagcttctcctcggcacttgtgggccttcgctcctggggattttgccaggaggggaatggagagaggggtctggactggcgccgccatttgtattgttgcttcctccggccatgtggctgcaggagctactcccgtgcactagatttactggactttgtgcaggggttacagatgtggatgagacccagtgtcactccccccatgagcatcctgtccggaaagctgtggggggacagctgtgtggctcactcctaggcagacattgtgccaacaaagtgacgttgttgtttccaaatagtttgcagctagttttaactcagtccatcagagaagcctccctggaggaggtggcatttgggctgggccttgaaggacgaatatagacaaactttacatcttttcttgaaaaaggtgctgtagttattcaaagtgacagaggaagacaacaagagaatcaggcaggtggtattagaggtatgcttccgtttctcggggaagagaaggggtgagagggagctgaagccaccccgtcgtgtactttacaaacttaaaatttcaagatgagtttgtgtgtgttactttctgataacaagatatgaaattccttgcattttggggtgctgagattggcaatagtggttttccttctactgaggaggcttggtttgctctcttgtattttactttatttggcggggtggaggatgtatagtaagaagtagaaaccacactgtcctcttttcacactgaccggcaaagctaagcctcatccccaaatgattttgttcctagaagggagagtattttcaaattcagcagaaaagtcaggagtgaagatttgctgtcatggaggtaacttcctctctagtaattggattagattctgagaaaatgacccaaacaccactgcagcaatcctcagcttcctcccgcctccccgcagccccgaatgcatttgcacagaagcacacaccagtttcctgcaaataaaatgcactggcaggtggctgcactaaaactgtttttcttttaagctccctggaatcctgttgaatattaaagttccatcttgaggctagactcaattcagatctgcctgtaaagatgtaaaacagcgattcttcatttgctgggtgattgattcctgactctatgctcagaatgtacatgtttgcagagcagtcatctacctatgatactgtggggtgtgatggatggcatagcagatagggaaaaaagcttgatgcagagtcagggagagcagctcccttgttccttcactctgcacttaagtaatcaaccttatcagcaagacagtcaatgagatttaggaagaaggagaatttatacctgggggcggggcagcctaagagtgccattcctctctgctggtgtttatgcttgcctaactaatgttgtcctgcaacagaaagactaggaacaatccccacccaccactaccaaaaaaaaaaaaaaaagagagagagagagatcaagagaaatcacccagcctgtgcctggagctacagcgaataacggaacttgagtctcctacacccctgatttgcatccctgatgataagaacaggttggcaaagaaaatgtttacccaaccaatttgctgtgtttggggagttatcagtcctcacagtccgcgatgctggcgattaccttgtaaataatgcatgggccacttctggttcccagtgtgctggctgtgtgggaaagggcaatgtctgtacgagcaggcagagaagattgcctggcacctactgcggctgttttgctgaacctgttgcccttttgacaggtgcagaacatgtctcaatccatagaggtcttggacaggcggacccagagagacttgcagtacgtggagaagatggagaaccaaatgaaaggactggagtccaagttcaaacaggtggaggagagtcataagcaacacctggccaggcagtttaaggtatgcatgttcctccccctctccctccccttatcctcctcctcctcctcttcctcctccttcccctccctcctctcctccttctcttcttcctcctcctcttctcctcctcttgctcctcctcccttcatcctcctcttcctcctccctctccttcttctcctcctcttcctcctcctccccctcttcatcctcctcttcctcctccctctccttcttctcctcctcttcctcctccctctccttcttctcctcctcttccccctcatcctcttcatcctccttttcctcctccctctccttcttctcctcctcttcctcctccctctccttcttctcctcctctgaggctgggtgtgctttcccttcatgctctccctttccctacagaaatggtcatttggggcagggagaagcatagcaaaggttgttctgtgccttgaaaggactgttgcccttggcagtagggaggccaccactggccctggcttggcagaagccaccttgacaggggcggcctgagtggtggcagcagcatacactcgcccccaagcccccgtcagtgtggtttggaagccaggggtctgagatcctgcgctgcccgagccaagtcgaatattagctgggaagggacatcgttattggcccttgtcattctgcagctgctgcaggtaaatcacattagccaaagattagctgaattgatgagggccattctggagcaggaatctctcagggcagttttcacatctgacctaatctagccatgacaaagcataccatagacttgcagggaaaaaagagagagatgccagcctcctttccacctcgtgggaagtgttctgcttctccgggtaactctggacattaaaactggtgtttgtttgacctaaaatcatagatacagatgtgcagccaggtagagagatgcccacagttgactccatctcagtgcgattcgactgaaacgttatatgccgccttaatgaaggtatacatgcattttaattagaaatccagcccagatgtaaatgaacaggtcaaattacacagcctcgcccgactagaaactgctggtgtactctgtctctgtcttcccgtcctttttatgctaatgtttttcttcgatgtgctccctgcatgaggcaagaactaattctcttttaaaaatgatacattaaatagatgaaatggcaagctaatgaaattataaatctatattataaataaaataatagcaggcccaatcctgttgaggtgaaatgagccgattgtgctcatcagaggcagttggacatttttgtcctcgcatctggctggtcatcatgaattactctggagggagagatgttgacctgtctaaccaaaaaagcatttatgtctctgagccagcactcccttctctgcggccagcagactcctctaacgaggggggtgtcttcagcaactgggaggtagctcatcttggcaaacgttgttgacacaggcatctctccgagtttccaattttggggtgctgtggctctgggggaagaaaagcaagcgcttgcctatactgtgctaaaccgcattaaaaaaattccaacagaaattgtgacgagggaatctcaataactcttaaagcagtttgttttgactaactcgagcattacagtgggatttttctaactgaccatgcaaatatgtgtttcctgatggctgtctgtttcaggcaggctagtgagctagttcttcaacggtatttcattttcttacttgcagggctaacttaaaagagttttttcaatgctgcagtgactgaagaagcagtccactcccatgtaaccatgaaagagagccagagagctttttgcaccatgcatttttactattattttccaatacttagcaccatttcactaaggaaccttgaatacaaccaggatcctcctttgcatgcgactgtagctgcatttcatgaatagtttgaacccttgtcaatgcattttttgaaaaagaaagaaaaaaaaaacttcgtgtatgtgactcaaagcatgtaaccttaagatgttgcattctaaactgacaataaagacctttcccaaatatgctggtgttctgaggactgtttaatatgctcttctaactcatttggaccagaacaaataagcctgtaaataaagcgggaatatacacactttccctcacctagggagaagccaggccaaggcagggtgtgagagttcttgcatgcatcgcactgaaccagcttattttaaccttgcaggcgataaaagcgaaaatggatgaacttaggcctttgatacctgtgttggaagagtacaaggccgatgccaaattggtattgcagtttaaagaggaggtccagaatctgacgtcagtgcttaacgagctgcaagaggaaattggcgcctatgactacgatgaacttcagagcagagtgtccaatcttgaagaaaggctccgtgcatgcatgcaaaaactaggtaggcccagtaccctgcgggacgtggcgctgcactgcccacctccggcacacgcacaggcttagggagtggtgctgaagtggacagcgcccgcctggcttcgcgaggtgatggctggattagggctcctgggcaggtctaccttgagagacagcaaaggaggagcgtaggccacacccatcctagggcattgttcagagccgggtcttgtgcagaggccacagaccccgctgagtcgcacatctggaaaaaaatagcataccatctggcagattgtgtgtgtgtgtgtgaatcgtatgtgtgtgtgcattgaagacaccagtttaatagggctggcaataacatctcagattcctccggattgagaacgggggctggtggagctcctgaaatattgaatcatgcatagtttgaataaaaaagggaacaaaattcaatcacatctcagtagagctgccattcacagcacgggagggagcccctgctcacagcctggaaggggaggagcctctgagcaaatgaaccccttcctcgggtgtgtttcctaagaaagacccccagtgtggggtgacccatttggattcttatttctgattgattacccattcaccttatcaactttccagttaattactaggagaaatattaacacattagtgtctgagtctgcttttaaatagcacatttcaaatcccaattccacttttaatttttcttaagaaatattagccatccgtcctcaccaagctgtttttgttttttgttttttgtttaataacacaaaggttgttgttttcatactacctactttttagggtaacttagggtaattttagggtgattttgccttatgaagtttatctcaggctttctctgatgttctaactggattacctttttatttctactctcccttccacacacacacactccaagtgccttactataaacctaaaacatccaaaaagaacactttaaaaaaaaacctctaatgttagtcaggtgaagagagagaatattcaaggggaaagaaaagagtcagccaaacccttggtttcccaggttcccaatttaggtgatttttaaacgctcttctaggtgtcctcagtgaacgcacaaagctttaaattccccagtcccgaaacagagacaataagaaatgcttggagtcagagaactaatccattttgatgtgtgcatgctggctgtgtctcacgggggctgctaactgcattctttcagctctgtgctccatggtgcccagccctggtatgacagtggctgggtgatctcagacagtcccaggaggggggtctgggccagatggcctctaccatggcttcccaatttgactttctaggagttggtgtgagtgtttgactttctaggagttggtgtgaatgttaatgatgatagggctgtattaacgatcatggggctatataactattgcccttgggtactgtcttcggcttgctacccatcgtgaccttgagtgacctcaccattgcccctctctccaggacctccaaacactcccacttatggggtctccctcggcctccgaagaatccagtggtggggtctttttgttgttgttatgtatttccccatgagcagtgtcttccctccctggaatagacagggcacatcatggagaaacccagagaaaacctccacattttccaatcaaggaatcaagggagcaaagtgaggatttggagtaaaaagttgcaaatagtgagaagccaagggcctttctgagggggcaccacccctcccggatgagctggccttcccatctgtgcttggcctatttttagtagctgggtgagtttaccttgcagcttaaaatcttgggtcttgtgaaagagatcacatggccgtccttgggctgctaacaccattgatttgggagtaaagagagagggttaacaggcctccagaggccctctttctcccacctttggagtgcagctgcctggtttcacctctgcgtttaattctttctttggaagggctgcgacacgtaggcggagctgctgaatcagagcgtctgcaggtggggccctggcatctgcccgtagccagcacccagctaatcttgacacacagcaaactgagctcccccgttagaggaggcagttttgtaaggtagtaaatgccactcgatagctgtgcgactcccccaaggcatttcccctctcgagtttcagctgcctcctcctctgtaaaatggtgcagggagtccctgagctctggggtaattcatggaatggtaattcatggaagtccttcagatcctgagctcagcactgtgcccagcagaggaggtgctggtaggcaggtaggtcgatggatagagaggtgatgacagctgactgataactggataggtagttagatagataaatgattgattgattgattgattgattgatagatgattgacacatagatagagttagcagctgctgaccttcctcctccctcttcccaggctttcattcaagctcagtaacttaagcaccaaattaatatcctgcagctgcttaatttagcttcattttagccttgcaaataggtacccatctcaggaccaccctggcagcctgttcccttgctgggaggttgctgaggagcccggccttctgcaaggtggagccggcacccgctgccggccgtcctgggtggtgagggcttctgtgagacgtggcctccagtagtgggcagtttcctcccctgtcccggaccccgcagtttcttggtgtgcctgctgttcctgctggtgtgaagtgtgactgcaggttccatggtctagtgaacagggtccgggttcccttcctgcagtaagcctggaggagaggctctcccaaagtcttcctgatagttctctccttgctgctaccttcttcaagtcactgttgctgacaagcccagaacatactcagaaacagagaaaacaaggaccagggctccatcagttttcagtttccaattctgaagatccctcttttgatggcattatatgattttcctaatggcccagccagaaacttgaatctgaacctctcctctcgggcatcctctggaaaggaggcagtttgccggttcccctggagcaagtcttgttgccaggcaaggggagagtcagtgctgccccgtgcccctggcctcgtcccctgagctgggcgtggggccctctctccaggggagcctgcagagtcagatgccccagcagcaaagctgagcgaagccagaagcgtgagggtcagtgcacgatgctgctctacccatggagctcccggggcgtggcatgtgcctgtcagcttcaggcctccgtggtcctctctataaatgaggggtgagggggccagctgatttgaagggctcctcccagatataccatcctggcactctggtgctaaaggcttccttagtttcttttttttcccaaagcctgggaagcccccagacacccataagcacagacagagcctgggcttcagggtcagtcgggtctttttgtttcactggaacgcgtcttaacaaagcccgctggctccagcttcagagtcccctgtcagccgctgggagctgggcctgcctgggtatctaggttgatgcaagtccagttgcaggcccccgtcccagctcgggatggcagggcatagtgcttggctctggcaccatgccctacactctgtcctgggggagacaaacctgaagcctccctcttgttccctgaccctgagatgtgagaaagggtcagccaggcagagagagggtctgtcttctcctgcccccggccctgagtggagctagacagtgagccactgtcaccagcacacatggtgcgttcaaggatagagagttaagcccttgccagtggattctgaaggaaaacccactagagtgacaggggaggaaataaaccaaaatctaaaaagccgctcagaagcactgactgagtggggcccgggcggccagggcttctcccaggaagttctccagatgacaggcggtgagagtctcctggaggcccgcccttcctgccatgcgaggaagagggtctgccgtgaccctttcctcagtggccgccccagcccaggccctgggtctgatctcgaggcctggcggggatgcagcatggttctcagcttctttcatctgcattttggacatcggtttgtccaagttcccagctttgcagacttcttccagcttaagtcttcccggattgcaggaggtaaaagctgtgaccaagggagataggctcagaggacaggcagcaggacaggaaccccatctgcctgcttcagggcactcagccctcctggtctgtctcctttgttgcccagagacccctctgtctctggcctgaggtcctcagtgggcatctccccgggcctgttctatgagatcgtccatgctgctgcgtagaagtggcctcctcttgtgaatagcaagaggcagattgtctcatccgcaggggcatcagcttgtccaggctcccggccttgcacagcgctctgccctctgagcccgtctggggccgtcggggggcctctgcccctccagctgagcatgctggccctccaagcccaggccttcctaggagagagagcccgtttgggccatttcctgagcctccaacagtgcaggaagcccggccagccctctcctgcctctcccctcctcttccctccttgtgtgtgcatcctgagtgctcgtgactggagagggacgctttcctgaactgcatgtgccaagattccactgaggctctgccatgggcttttttggatcctgtcagttcctgaggtcttggcagaagcagtctggatggagaaccaaaaataactccctgactcaaggagggcaggtggcctccagccccaagggccctgggagctgtgcctacagccagcagttggaagatcagggtgcagagccagcctcacccttccctgcccttgctaagccaggattttaaggctcatttcaaggggtcacttttgcatttaaaagagggagctggagagggtgatgctcagctctgagccagtggggcccatgcaggagggaagagggagcccttggcccacggcagggtgggcctggggcagagccgccctctggagagcagaactgcaaggtccagggtgggcgggatgaagtgggaggggtgaagaccacgtccacttgggctcgccttttctgcacatcctcaggctgaatccccagtgatgcctcctgacctctgtggagctctgactctgtggcaggtgctgtcccaaaagctctctggtggtccctgccctaattctcacagcagccttccgagggggcactgttgttattagcccatctatagagaaggagagggagtacacagcagcccccagggaagagggtcaccctccctccttcactgagacagagagtgaagccttcgacttgggaggcttttctgagcaatgagtcattcgttcattcattaattcattccatacaaatccccaggctgagttttggaggaaacagggtgagtgcaggaagcttcttccctggggcagtaagacccagacattccttggcagccccatgagatgtacggtgggaagctggctccggctgcagtgaggacaggcagaccaggcaaagtgaaggaagggcacgtctttagggcagaggtgtcagtttggggcaagccagtgaaggtgggtgggaaggtggggctggggccggcacaccaggtggagggacagctggagcaaagctgcgtgaaccagcagggcggggctctggccaggcggcggagaggagcccagcactgacttgctgcctctggcctctgccggctgcctgcaaggtggagggcagacacctggtctccttccggtaggtcatgcgaccgggatgagtctgctgcgggtgtggttccgggcgttagtgtgggccagcgtcacggaaggcccggcgtgttgactgaggaggctgaagtggccagagcccgtgtgcgctgctggatggaaacccagcatggggccgccactcctctaggcttctccttccggacaactaacagaaccacggcgtggaaagtcctcacgggatgttcacagggccaaggcactgtcttaggggacaccagcctctggatggcagggagggctggagaggggctgtgaagggcttctcccagcgcccacccagtgcagagggagctgctgtctcccccgaagcccagggccccccagcagccggagggtgagcccagccatggctcctccctcccacctcctgcctcctgctcctccagggccttagtgaagccgccctgagctccacctctccgccagcgagttgcactggggtgaaaatctgggccgggctctcctggaagaggagtctcttgtgagacttctcagaccccccacatcttcttacttctcgtccccatagacgccggtcagctgtggccatctcctctccatccctttcttctgctgcttctcctcccacagatggggagcatggcctggcccagagcccgtgtggaccacggccgagaagaccctggcagcctctcacccggccccactgccaggaagcctccagccatgaggggacaatatttacttgggaaagcacataattcctcctgaaagtaggaatggggaactacgcacggaggaggaagggagggaagggctgtgacatttcttcttccaatcggggcagaggcggcagcccgggagccaggttgccggggccttggagcaatgcagcccgactcgatgggaatttgggggcaaacccagtctttttctgtgggcagtgggctcctcgtccctctgaaagccctggtgcccggatgcacgctctcccaccaacccacagaatcggagacgcctccatgccggcagggccgggagcgttcctctttctggtcttgtgtgatgccagtaacaggccacttccagttgggagagagtgggaggcaccctgagacccgcgctgagcatgggagtggccaggccgcgtcctcccgggggccagcctggagcctgccccaccctgcttgccgacaggattatcctggctgagccgaggtccgggcgcactcacccgcagtcttcccccacacgtggatggcctctgaactcgtgtgctcgtgcaagcccaccgagggtgccacgcagacctaggaggtcacaggcgggcttggccgggagggacagggcagggtgcggggacttgtggtggaggggcccttcctctaccctccccaggaaagccacccacttcccatccagggtccctgttagaatcaggagcgtttggcccttcagagggcggccgaggctcgtgcattctggaagagctgcgtggctgcgcagacacaccggcctccgggcaggaggagttctgttcctgtgcagtgggtgtggaagccgccctgagccctcgggggtgtggggggctccagcctcagtccaaatcaccgggtggcccgggtgtgtccctcctcacctccatggtcctctgtgagacgggagggctgctgagatcacatccaggatcccatccgccctggtgcgctccagcttgggctcctcccactggcagaagcaaccggctcacgcctgtgggagaagcgcgcaggctcttcctgcgggaaggcagctgtggcctttgtcccgggtcagttccggggcggctggtggtgctgctgctccatcgtgggacagggcctgcctggatgcagtgtctcacactgggcctgactgtgccccacgcgggctgggctgtcagggcatgacctctaatgcccttgggggtggagccgctgcgttcccatctccaagagaagaaaattgagtcttggcaaagctgaccccctctcctagaggtgctgctccagcacccccatccccaggccatgggtccagcaggctgaggaggcgtgaagcctgggagggcggccgtctgcccacggctcttccctgctatcctggccacagctgctctgttttggggaggaggtggcttttccgagagtgggggagttgtctgtgaaaacaagggcgtgagcagctttccacagtaccccagaccccgagggcaagaggagaagccgccacatggcacgtgtgctctgggcagtcgaggtcagggtcatcaccgcgggccggggcccccgccctccctctcctgacctgcgtgctcttttccagcttgcgggaagttgacgggcatcagtgaccccgtgactgtcaagacctccggctcgaggttcggatcctggatgacagaccctctcgcccctgaaggcgataaccgggtgagtgtccccttatgtcatagggggtcatttgggcaagggcgctctcggacacctggtgggccccagacatgggtacaagccacgcccaccctccagggcctatggactgggcagcttggtgcctgggggcgtttgttcctggaagactttcgggagggacccaggcctctatgctaatccagagctgtagatcatgggccagggagtgacatgaggttgatggtatcccatgacatggctgtagaccccttcaaggcctcctccccggcccggtgggctgggctgggctgggctgggctgggctgggctgggctggtgccccaagtccatttctctggagccgaaacccagccctgacttttccggtccttgcatctgcttcaggaagagaattcattaggcctttcttgttttaatgacatctcatttgtatttcatttgccattcctttcatggctgatggagactcatgttccttttgatttaggaaagaggccatgttcttttttcccaggcttttccccgctgggtgaaacctcagaagaggagagagaaacaggcatcatatttgcctttatctggggggctgggttttatgttcgagcccctttgaaaaatggggaggtgagggtggctgcccgactgatggtgaggcccggcctcgctcggcccctgggccccagacccctgtatacaggcagcatgggcttgtagactccctccaaagtgagcaccctctgaaggctctcgatgggggagggaagctgtcagggcttcgctgtcccttgatttgcaaactgacctctggctgccagagtgggcatttctcacccagcaaccccttccttcaggggtttgcaggacacttagaaaataaacacttaaaaacaaacaacccagctctgccctgggccgactgagaaaggccctttgaaatgtgagatcctctaagctttatctggagcgggtttgaaggaagggatggacccagctctctcccctctgatttctgatctctttgcctccctccttcaccattgccaccatttccacgaaatctcttatatttaaaacatgggcggtacggcctctggcacactccttccttccaggaagatggctggggaggggagggggactggcagacttgctagagcctgttgcatgtgtcttgatcccccagcctcgcatgggagtggcccccgcccccatctggaagggctggccagactgcagagccgggatacaattggtgttgggtgtttgtcagggaggtttttctgtcctgttttctaaattgtgacagctgaggcttggaagttttctaacaatttaattagctgtgaagactctgaccactcttttattccacatcccacctggaaaaccccacttatgttcagagttaggaacttgctcctgccacagatgtttttgtaatgatcataatacagaagaaaacaaggtgatgctggcaggcacttagaaagcaggcccgggcacagtggctcacacctgtaatcccagcactttgggaggctgaggcgggcggatcacctgaagtcaggagtttgagaccatcctggccaacaaggtgaaaccccatctctctaaaaatgcaaaaattagccaggcgtggtggcgtgcacctgtaatcccagcgactccggaggctgaggcataagaatcgcttgaacctgggaggcagaggttgcagtgagccgagatcatgctactgcactccagcctgggtgatagagcgaggctctgtctcaaaaaaaaaaaaacaaaaaaaacagcgagtgtgtcctgtgtgcaggtgctgtccaaagcactttcttttcatgcattaactcccttaatagcgggggaaggacggggccttcatgcagccatctgcgtgcccttcctgctttgtcctccctgggacctgcctgcgtcggggtcattggcatctcagtgtggatgacaagactgttctcacgcccagaggcagaagggtctcaggatcatggagtgcctgtctgcagcatgcactgacactccaagccgagtcccttataccaccctccccctacaagtgcccttcccacacctccccgcaatctggcccaccccactatgcagagcaggaaaaccaccccacaaacccacgctgaccacattgagatctgtgagcaggaagcagtcacctccctgctgcagagggcaaccccagggctggactgctctgtctgtatctaacaccccccaggactggactgctttgtctgtaccttacaccccccagggctggactgctctgtctgtatctaacgccacacgtgtgtgcctcttgacttctgtttttgtatcaccttcctttgtcgtagggagcactagtcaagttatcgtttttctaggtaccaaggatctggggctcctggaagccccggctgtttgctttgcacagcgcagcgagggtgtgggtttgcaaagctgtcgcggtgctgatggatgcttttgatcattaggcatctattttctgcttgatgactggatcgccctccaggaaaagaggctctgatggtgggtagagtgtggggagaagaagccgcaggagaagggatccctggcaagggggtgggggagatgggtgctggggctggcagaggagccacccggagcctgctcagagcaccctcggctacggccattccaagccatacgctcagcacagcctccaactcccagtgtgctaagtgacatgtccccaggtcctgtcattgatctaggccagccgtggtttgtttgttttgatcttttccaatctcccattcagttttgatcacacacacaggagcccaataactcgctccaaaaaaaaaagaaaaagaaatcaatgtcggcttcagtgcaggctgccacggagggcattgtaaggcaggtgtggccaagggcagaggggagaggttcaatggggctgcctagtagagagcccggctcagggggacctgcagaatctctgtgttcgtgtgaccacaggagggacggtcctgagccagcttcagggccttgctaagctgtcagaacaaggttagcttgggacgcctttgcagcaggtctttctggattcatttattaagcactgactgtatgtccggcctgtgctgagcactgagagcccccaagttcttctcagcaggaagccacccctgcgcttcccagggcaccgggccccacagcccctcctttccttcccgcccgtcccattgcctcagtgttggaggagggaagggctgtgtggaggttggccagctctcaacctgatgcgtgaatgccctgccaggctgtgttcccacccactgggagaccacatgagttctgggaccccttccccagctcggaggcttctggcctgctctgaccatggcctgccttccagagcccaacatctgcctcctcctttctgacccgcttcctataaaagtctcaggtcagctcacatcagacaccagacaccaaaaagggggccagcgctactcccaccaccccaggaagttcatgtttgaaggggtgatataattaggaaaacactgtcatttacaaacagcagcaagcttagcttagcgtttcaaagtcctttcccatcatctaaacagcgtcaaggccatctagatattttataaggatcccacggaatctttttttccagaaggtggaaatatccaaaatgcataaaaccgtgtgggtgcaggcagtgatccgcccgccgccagtggtgcaataaacatcaacgccccttccagtcacttctcagtgtgaggagggaccttcccaggaccgagaaccgttgtctgttccccttcagccttcactccccaagtggagcctccggcagaaactgccagcatcccccccacctctttcccaccacccattcagctacgggccgctttagagtgtcttttccagcggcccaggctccttgatgttaggaattctgtcaggacgacatgtgacagatgcttgccaaaccaaagggaagtgccagcgcgggcccaagtccctacgccaagaccccttaaatagcatccgcttcccacttcccgggggctgcatcagaggcatttgggacggcagtgccagatctgtgcccatcgtccagctctaccctgaaccgagaggccctcttcactgggaagctgatgaaagtaatcgggacagttaggaaaatcccacgttctcagtaaactgcaccacatgtggctgaaatgcggtgcagaggttcagacagccagtttttcttatatgggaagctgtgttgggcctcggtttcggagaagcctggtcccctgaaagcatggtatttacaaatgcattttgtgtttgcgtgagaaggaagaacccacccgttgctttatcttttccggcaaagaaaccctcatgggttggggaggggatttgggcaggaacttggggccttccagcctgtgtcgtcgaattagagtgaggctgtgctcggggcagggtggcctcgctcgccgtctggccgcaggctctcagggactgtagcgcatggcccattgaactggagaaggatgatcagtgtgcgagacctccacgacccccaggaggcctgagtccagccctgaccccctgcttttcctagatctcggggctgggaatctgaactttcctgcctgtgctgagggtgggtgtgttgcggagcttggggacatcagatgtcaccagtgagctcctgtgtggggtccctgtgggtggcgtggttcagagctgggcacagaggttcggagctgctccacactggagtctgcgtctctctgctgcccctcccagctctgtgacctttaggatattctttttttttgagacggagtcttgctctgtcgtcagactggagtgcagtggtgcaatctcagctcactgcaacctccgcctcccgaattgaagcaattcccaggcctcagcctcccgagtagctgggattacaggcgcatgccatcacttccggctattttttttctgtgtgttttttagtagagacagggtttcaccacattggccaggatgatctccatctcctgacctcatgatccacctacatcggcctcccaaagtgctgggattacaggcgtgagccaccacgcccagccaggacattcttaaccttctgttccttggggtcatgatcagaaagggcacacctgcacagggggctctcagcatacgttgtgggggcagcaccagtggctctaatacaccaggtttcagctcatggcacacagcagcccgtccagctgtgaatggagagcagttaggtcagggagggacatgcactggccgctgatcgccaaaagggctccatggaaagacggcaccaggggccacccgccctgtggggctctcagttgggagaggcacctgcagaagagtctctggtctctgctgtctaaggtccctgttccctccaggctgcactggccttctgttcccagaatgttctctctggtctccccttcctatgcctggggaaccccaagattcttccagcacgaggatttttgcgtggagccatggcccctcatgaggtcagaagctttgggaggacagggcctgtgtccccagcacctggaaaataggagatgaatggtggcccttgatggagcttggggcccagccttggggctctgtgtagccaagacctggggcaggatggccagccagccatgcacacctgctttcaggcaccattctcccagtcggtgggtgacccgtccacccagtccgcacagggccactcttgggcgggcgtctcctgggccgctgtggatgccttgaccctgggagagctcagcagcaagggctcgtgtggacaccgtggtgtcctgggaggatggcggcgtgagagcttgccttctgcaggggcacagacggaccaccacatggggccgccaagtgagattgggacaaggtccctgagggggagaaggaagggggatgagaagaggccatggcaggagggaagagggcatcactgggggcatccagccagggatgagcaggtgcggggagctgctgtctccttcatagatggaagccactttgtggcgtgggggagggcagccttgggaacctgggtggaagcaagctgtgtcggggtcagggcaggctttggatgtgctgtgtgcaagatccagaccagcgtgcacgcttcctaatgcacagagcatgtggcagctggcacagctggccatgtgaccctgagagaggccttccttctctctgggcctctctgaagtggggatttggggacggggtccctaagcctctgtgactctgtggagggatgggtgtcacggcctgtcttgctgcatcctgggctagtccggaggccaagccccctgtggtctcggttttcagatgggctgaccctaccgccacgtccccacaggtggtcttatggccttcttcctttgggtggtgcctgggcctgatgagctccagcaggctctgagggccgtgtctagcctacccagaaccaccaagcccactcgagtcccgggctaaggacataaatgatgatagctggcatttattgaaccactacaggtggcaggtcctcacaggacctattttacagcagagggaactgaggcacagagaggggtggaaactccccaggtctcgctggagactggcggtggctggcggtggaggcgcttcttggtgccgcattaacaggagtccagccacgtggacacccctcactctgtgggatccacagagcagtgcctgggaggccagaaagctttggcagacccacggtgtgccctgagctgagtgggggtgctgggtcacagtgaggcggcaaggcctcccctccgggctcacggtcaggtgggagacacatgcccgatgccccagcacacgggtgtggaagcccaagaggtgccctgtggctgctgcaggagctcccacagcctggggggcaccacaggggctcactgtcacccagtgctggaggctggaagccccagaccagggcgcctgcagggctgcgctctgaagatgccaggggaggaccctcctgcctcgtctcgtggctccatgtgttcctggctgtggctgcatcactccagtctctgcctccgtcttcacatggctcctccctgtgtctgtgtcccctcttctgtctcttataaggacacttgtcactggatttagggcccaccttcatccaggaccagctcatcttgagattctttttttttttttttttttttttttttgagacagggtctcactctgttgcccatgctggagtgctggagtgcagtggtgcgatctcggctcactgcaagtgattctcctgccttagcctcccgagtagctgggattacaggcacgtgccaccatgtccagctaatttttatatttttagtagagacgaggtttcactgtgttggccaggtctcgaactcctgacctcgtgatccgcccaccttagcctcccaaaatgctgggattacaagcgtaagcccccatgcccagccgagattcttaatcctatctgcaaagacctttttcccaaataaggtcccatttgcaggtcccaggatgtggacctatcttctgggggccactattcagtctactataagagtggacacctgcctgcctgggggtacaggggtttaggaaatacctcccaagggggtgagtgtggcctggggcagggatggggacggggtggaggggcagctcccgcaggcacagaggcaagagttggtaggtctgggactgaaggatgtgactgggcagcctggggagggagggaggggctggctgggcagcagagtttggagtttgggatcagaaagggtgtgtacaggggactgggtaagggacaggctggaccggcattctagaaggttcacacaggccacaccagagctgcagaggccaggagggagctgccagcaccactgaggaatgaggcagcgggaaccaggccccagacacggattattcccatgtgcatggggaatagccctcttcgcacgcggcacagtgtggaccccggagctgatgtcatccaagccccccacccacccctgctctatggcaggaaggatgaggccaggcaggaacagcaagcttctccctgcaaatgcgtctgccctatttgggacaatttccccgctggagcttgacacacacagatcctttcctcaagaccgctagggccacaaaaggtcaagggtgaatgtacttctttgtaattcagccctgctaggaaagaaatatcctctattgtgggagccaccgaaatcttcagccaggggtgccatcttcaccttcctacacattcaccactcaggtctgcagcttcaggccgagccttcaaacccacgtccacatccaggttgcatccttcggaagagggaggaggccggcgaagccttacctggccaggccccacttccccagcacagggacgagattgcttgcccaaggtcagccctgatgggtgacgcagggacagagggtttgccctccaggttcccctgggggcagaaaggataagtggacggagggaaatgggccgtttacctggcaggttcatggcatggacagcagcgcatcagggctggggcttttcagcctcacccactgacgtgtgggaccggatcatgcctcgttgcagggggctgttggtgtgtggggatgggtagcagcacccctggcctctgcccctagatgccagcagcactttccccacttcccagtcaagacaatcgaactgtttctgggcatgtgcagtgcccccagggcagatcaccactggccagattggtggtttcaagctcagggtttggagtcccctcttgactctgaccactggaaagtcaccaaacctccctggcctccattttctagtctaaaaatggggcgatcacggctccctgggtgcacgggctcatgtgataattgaaggcaagagatgatgccagcgtccggcacagtgaatgccctgagtaacggcacacaagtgacctggcatccaggcagcctggttccgctcttggccttttgctgggtgcccttgggtctttttggaaagaacgataggtcctgcccggaggcgcaagtgctcaatctccctaaaagccggtactgtatttggggccgcctccccagagaggaagctagcaggcattgatggaatttgatctgagccttgggacttggagaaaggggaagaaaaaggcctttcagatgagaacattgagggaatgaactcagaggaggggacctactgtgaagcacggggctccttatcccaaggcctgtggggttctgagtgcctctctttgcatgggtgccttcccattggcaactggatctcagcctcgaaggagtttttaccccacagaaactggcaaacgctcagagcggcctcccctgaaccctgcctgagcctgtgcaccgtgtgccgattctccctcccacccccaattacatcttcagagtgcggtatcctgtgtcattttgctggtgtactggaagagaaggtgatttaaaaatccttagcaagttgatgctggtgtatcccccttctgcccatgggaaggaggctctggacccagggtacaggggtgagtcaccctgggtccccgcgatcaagggcttgtttgtgggggtgatgtgtgaacacagtcaaaggtgttctgtgtgctgcgatggcaggggtggttcccctccaggcaggtcaggagagggcttggggaggaatggtattagatgtgagtttcagaagcagtgagctccctgtctgatgagatagccaagcaaagagggggcaagagggcagctttgtggcagtgtcattaagggggtttcagcacatggccccgttccctccaatacccctcccggttctaatctgtgacccacatcattgaggtttggtctgtgggaggctaaggataatagcctcaaatgaggcccagctgaaaaaaaaaaaaagatctcattaaaaacaaaaagcacatctgcttgtaagtatcgaatggatgtcttgagaagaaggttataatttttttttaatttttagcgcgtgtgtaatgccaagtctgaaagctccctcatccttagtctcctgcagctccagagccctcgacggataaagcagctgtctcattgccagacagatgcatgcagagcggcaccagcctgccagactccctctgcctaactgcgttgctttctaatttgctcccacattggttgaaaatgactaaagcattttgcgcaaagtccagacagttctcaagtcaactggcatttcatcggaaatctcttcttctgtaaccccaaacttgggccattactgggtttgctatcttggttgctttcgacaaccagaggcttcttcaaagcccatattcttctcggagaggcacttttgctggattaggggtgacaatgagtgattacactcacagcatcccaaatgccaaattaatgacattccgccctgcagacaggatgactcagtccgtgccgcagcgatggcttggtgggaggagaggccttgagcgtggtgtcttgttgggatatgggagctggcccgccccggtgactttgagagtcgatcctcactgcagacaacagctgcctggggctgtgagcatttgccctcggctaggccaggtggctgtgccccttcgaaggcccccttcagccctgggttctgtactgaaggagctcctttcttgcacacgtgtgtatgacccccactatgggccaggcccctggctaggggtatggcagtgaacagataggtgcagctgctgccccacaacctggtgtcatcccaagcaagcagagggcaggattaggggcgaatggctgcacgtatacgcctgtgtgctcccatcccaccttcctgctagattctttcttcaaactgggcctgtgtgtcccatcccaaattcccactagatcctttcttcaaactgtgtgttcccatctcaccttcccactagaccctttcttcaaactgggccatcctttctctgatagcacaatagctgtgtctccttttgaggagtgtgctgggtttggaggtaggacgtggcaccctttggttgtgactactctttcctggctctctgggtttggagggaggacatggcaccctttggtcgtgactactgtttcctggctctttcagctccttctcctgaggtccaggaaattccaagtcggggaacagcttcccgcccaaggaacagctttccacacaagcctgttccaccccactttggaagtgctcgccgggtctttggaagtgctcactgggtctttggaagtcctcactgggtctttggagtactcactgggtctttggagtgctcaccgggtctttggagtgctcaccaggtctttggaagtgctcactgggtctttggagtgctcgctgggtctttggaaatgctcactgggtctttggagtgctcgctgggtctttggagtgctcgctgtgtctttggagtgctcgctgtgtctttggagtgctcaccaggtctttagagtgcttactgggtctttggagtgctcactgggtctttggagtgctcgctgggtctttggaatgctcgctgggtctttggaatgctcgctggatctttggaagtgctcactgggtctttggagtgcttgctgggtctttggaaatgctcactgggtctttggagtactcactgggtctttggaatgctcactgggtctttggagtactcactggctctttggagtgctcactgggtctttggaaatgctcactgggtctctggagtactcactgggtctctggagtgctcactgggtctttggagtgctcgccgtgtctttggagtgctcgccgtgtctttggagtgctcgccgggtctttggagtgctcgccgggtctttggagtgctcaccgggtctttggagtgctcactgtgtctttggagtgcttactgggtctttggagtgctcgccgggtctttggagtgctctctgtgtctttggaagtgctcactgggtctttggaaatgctcgccgggtctttggcatgctcgccgggtctttggagtactcactggatctttggattactcactggatctttggaagtgctcactggatctttggaagtgctcactgggtctttggagtgctcaccgggcctttggaagtgctcaccgggtctttggagtactcgttgtgtctttggagtgctcaccgagtctttggagtacttaccgggtctttggagtactcactgggtctttggagtgctcgctgtgtctttggagtactcactgggtctttggagtgctcactgggtctttggaagtgctcacttggtctttggagtactcactgggtctttggagtactcactggatctttggaagtgctcacggggtctttggagtgctttctgggtctttggagtgctcactgggtctttggagtgctcagtgggtctttggagtactcactggatctttggaagtgctcactgggtctttggagtactcactgggtctttggaagtgctcaccaccgggtctgctctctccacaggtgtggtacatggacggctatcacaacaaccgcttcgtacgtgagtacaagtccatggttgacttcatgaacacggacaatttcacctcccaccgtctcccccacccctggtcgggcacggggcaggtggtctacaacggttctatctacttcaacaagttccagagccacatcatcatcaggtttgacctgaagacagagaccatcctcaagacccgcagcctggactatgccggttacaacaacatgtaccactacgcctggggtggccactcggacatcgacctcatggtggacgagagcgggctgtgggccgtgtacgccaccaaccagaacgctggcaacatcgtggtcagtaggctggaccccgtgtccctgcagaccctgcagacctggaacacgagctaccccaagcgcagcgccggggaggccttcatcatctgcggcacgctgtacgtcaccaacggctactcagggggtaccaaggtccactatgcataccagaccaatgcctccacctatgaatacatcgacatcccattccagaacaaatactcccacatctccatgctggactacaaccccaaggaccgggccctgtatgcctggaacaacggccaccagatcctctacaacgtgaccctcttccacgtcatccgctccgacgagttgtagctccctcctcctggaagccaagggcccacgtcctcaccacaaagggactcctgtgaaactgctgccaaaaagataccaataacactaacaataccgatcttgaaaaatcatcagcagtgcggattctgacatcgagggatggcattacctccgtgtttctccctttcgagccggcgggccacagacgtcggaagaaactcccgtatttgcagctggaactgcagcccacggcgccccggttttcctccccgccctgtccctctctggtcaaacaacatactaaagaggcgaggcaatgactgttggccagttctcaccggggaaaaacccactgttaggatggcatgaacatttccttagatcgtggtcagctccgaggaatgtggcgtccaggctctttgagagccatgggctgcacccggccgtaggctagtgtaactcgcatcccattgcagtgccgtttcttgactgtgttgctgtctcttagattaaccgtgctgaggctccacatagctcctggacctgtgtctagtacatactgaagcgatggtcagagtgtgtagagtgaagttgctgtgcccacattgtttgaactcgcgtaccccgtagatacattgtgcaacgttcttctgttattcccttgaggtggtaacttcgtatgttcagtttatgcgatgattgttgtaaatgcaatgccgtagtttggattaataagtggatggtttttgtttctaaaaagaaaaaaaaaatcagtgttcacccttatagagacatagtcaagttcatgttgataataatcaaaggaattactctcttcttgttaaattagctaaatcatgtaaccgcagataggaagggctcgcctggggaaactctggtttccgatgggacaggaaagtcatacgggcaacagtatgcggaaagtacgttttttaagtaaaaaacaaaggcaaactttgtactatccagttatctaaggaacaataaaaacattaggagatctttttgcttcacttgtcatttctgagagttttaaaaatgaccgagacttccaggtccttgcagacggattcctgggtttgagtggccctttgagaaagggaaataaatcctttctttcggaagagggcaaggacaggtccctgttggatctccaacctcccatccccccaacctggagaagcagcttagaatctacccgccacctcttaggtgactctggggcgctactccaacttggggctgtgcaccagggactccacccacaccccatctccaccctgctgtccctccatagacaccactggagggggcctggggcggcacccactttagtcagcactggcatggtgggcagagaccctgctgaggaaaagttcactcatctagggctgcagcaggcactggagataagtgacagccctctctgggacccgtatctccccaggccttggaaactatggccgggtgtgtgcagcccttggcaaccctgaggggcccagggcatcacatgggctagatcctgggagcttcgtgaggcccctgccactcagcaggccctgaggtctctgcaggacaggccacaactcaatgtttggagtctttctggaatatactggcacttcctgtcagccagagaaggaagaatgtcagagtaactccctcacaacgttcctggcaccaacttggcagaagagggctgctcgtctgggtccccaggtatagtgtgaggttgggagccaccctgctctcacctgccctctgcttgggggcagctggcacccccagcaacgtgggtggcagggcagtgatgtgggtcattggggaaagccaggcaaccctgtgagcctggcccagtggcacctgctcaaaccagtgagtggatgagcttccagcatttccatcatttgtcctggaaagacagccagccgggcggtacccaggtggaatcgtggatggcgcagtcagacaaagctgacgtctgtagtagccagtggaaccgagtccaagaatgtctgagaaggtgcgacaccagctcctgaaaccacacagaagttggggctgctgaaagagtgaaccggtcagggaaggtggcagctggggacatttggggaccatgtctagctcccttgttacctggccctggacaacagttaggaaaatacgggatgacaaatagggcacaggtgagccctaacccactgggtgggaagggaaggagaagccagcatctgcggagaggtgcagagcccagctcccagtcgccatggccatcagccgctcgtggagtcgaagtctgccccaggtcccttcctcctggccgctagggccatgtttctacagtgggttgggtgggccagtgatgccccagtcccaagctgcctagaaccccatggcaggggctcagtgcctgtctgtgccctgcacacgcctctcccagtcggggtggccacttcccatctgctctcctaggccccacccgccccaagcctctcgcctgccctgc

SEQ ID NO: 418 - DNA, 6287 bp, Homo sapiens
  source 1..6287: mol_type = genomic DNA
cccgcgcgtgcgctcacagtgtcaagtgctagcatccgagatctgcagaaacaaatgtctgaattcgaaatgtatgggtgtgagaaattcagctcggggaagagattagggactgggggagacaggtggctgcctgtactataaggaaccgccaacgccagcatctgtagtccaagcagggctgctctgtaaaggcttagcaattttttctgtaggcttgctgcacacggtctctggcttttcccatctgtaaaatgggtgaatgcatccgtacctcagctacctccgtgaggtgcttctccagttcgggcttaattcctcatcgtcaagagttttcaggtttcagagccagcctgcaatcggtaaaacatgtcccaacgcggtcgcgagtggttccatctcgctgtctggcccacagcgtggagaagccttgcccaggcctgaaacttctctttgcagttccagaaagcaggcgactgggacggaaggctctttgctaaccttttacagcggagccctgcttggactacagatgccagcgttgcccctgccccaaggcgtgtggtgatcacaaagacgacactgaaaatacttactatcatccggctcccctgctaataaatggaggggtgtttaactacaggcacgaccctgcccttgtgctagcgcggttaccgtgcggaaataactcgtccctgtacccacaccatcctcaacctaaaggagagttgtgaattctttcaaaacactcttctggagtccgtcccctccctccttgcccgccctctacccctcaagtccctgcccccagctgggggcgctaccggctgccgtcggagctgcagccacggccatctcctagacgcgcgagtagagcaccaagatagtggggactttgtgcctgggcatcgtttacatttggggcgccaaatgcccacgtgttgatgaaaccagtgagatgggaacaggcggcgggaaaccagacagaggaagagctagggaggagaccccagccccggatcctgggtcgccagggttttccgcgcgcatcccaaaaggtgcggctgcgtggggcatcaggttagtttgttagactctgcagagtctccaaaccatcccatcccccaacctgactctgtggtggccgtattttttacagaaatttgaccacgttccctttctcccttggtcccaagcgcgctcagccctccctccatcccccttgagccgcccttctcctccccctcgcctcctcgggtccctcctccagtccctccccaagaatctcccggccacgggcgcccattggttgtgcgcagggaggaggcgtgtgcccggcctggcgagtttcattgagcggaattagcccggatgacatcagcttcccagccccccggcgggcccagctcattggcgaggcagcccctccaggacacgcacattgttccccgcccccgcccccgccaccgctgccgccgtcgccgctgccaccgggctataaaaaccggccgagcccctaaaggtgcggatgcttattatagatcgacgcgacaccagcgcccggtgccaggttctcccctgaggcttttcggagcgagctcctcaaatcgcatccagagtaagtgtccccgccccacagcagccgcagcctagatcccagggacagactctcctcaactcggctgtgacccagaatgctccgatacagggggtctggatccctactctgcgggccatttctccagagcgactttgctcttctgtcctccccacactcaccgctgcatctccctcaccaaaagcgagaagtcggagcgacaacagctctttctgcccaagccccagtcagctggtgagctccccgtggtctccagatgcagcacatggactctgggccccgcgccggctctgggtgcatgtgcgtgtgcgtgtgtttgctgcgtggtgtcgatggagataaggtggatccgtttgaggaaccaaatcattagttctctatctagatctccattctccccaaagaaaggccctcacttcccactcgtttattccagcccgggggctcagttttcccacacctaactgaaagcccgaagcctctagaatgccacccgcaccccgagggtcaccaacgctccctgaaataacctgttgcatgagagcagaggggagatagagagagcttaattataggtacccgcgtgcagctaaaaggagggccagagatagtagcgagggggacgaggagccacgggccacctgtgccgggaccccgcgctgtggtactgcggtgcaggcgggagcagcttttctgtctctcactgactcactctctctctctctccctctctctctctctcattctctctcttttctcctcctctcctggaagttttcgggtccgagggaaggaggaccctgcgaaagctgcgacgactatcttcccctggggccatggactcggacgccagcctggtgtccagccgcccgtcgtcgccagagcccgatgacctttttctgccggcccggagtaagggcagcagcggcagcgccttcactgggggcaccgtgtcctcgtccaccccgagtgactgcccgccggagctgagcgccgagctgcgcggcgctatgggctctgcgggcgcgcatcctggggacaagctaggaggcagtggcttcaagtcatcctcgtccagcacctcgtcgtctacgtcgtcggcggctgcgtcgtccaccaagaaggacaagaagcaaatgacagagccggagctgcagcagctgcgtctcaagatcaacagccgcgagcgcaagcgcatgcacgacctcaacatcgccatggatggcctccgcgaggtcatgccgtacgcacacggcccttcggtgcgcaagctttccaagatcgccacgctgctgctggcgcgcaactacatcctcatgctcaccaactcgctggaggagatgaagcgactggtgagcgagatctacgggggccaccacgctggcttccacccgtcggcctgcggcggcctggcgcactccgcgcccctgcccgccgccaccgcgcacccggcagcagcagcgcacgccgcacatcaccccgcggtgcaccaccccatcctgccgcccgccgccgcagcggctgctgccgccgctgcagccgcggctgtgtccagcgcctctctgcccggatccgggctgccgtcggtcggctccatccgtccaccgcacggcctactcaagtctccgtctgctgccgcggccgccccgctggggggcgggggcggcggcagtggggcgagcgggggcttccagcactggggcggcatgccctgcccctgcagcatgtgccaggtgccgccgccgcaccaccacgtgtcggctatgggcgccggcagcctgccgcgcctcacctccgacgccaagtgagccgactggcgccggcgcgttctggcgacaggggagccaggggccgcggggaagcgaggactggcctgcgctgggctcgggagctctgtcgcgaggaggggcgcaggaccatggactgggggtggggcatggtggggattccagcatctgcgaacccaagcaatgggggcgcccacagagcagtggggagtgaggggatgttctctccgggacctgatcgagcgctgtctggctttaacctgagctggtccagtagacatcgttttatgaaaaggtaccgctgtgtgcattcctcactagaactcatccgacccccgacccccacctccgggaaaagattctaaaaacttctttccctgagagcgtggcctgacttgcagactcggcttgggcagcacttcggggggggagggggtgttatgggagggggacacattggggccttgctcctcttcctcctttcttggcgggtgggagactccgggtagccgcactgcagaagcaacagcccgaccgcgccctccagggtcgtccctggcccaaggccaggggccacaagttagttggaagccggcgttcggtatcagaagcgctgatggtcatatccaatctcaatatctgggtcaatccacaccctcttagaactgtggccgttcctccctgtctctcgttgatttgggagaatatggttttctaataaatctgtggatgttccttcttcaacagtatgagcaagtttatagacattcagagtagaaccacttgtggattggaataacccaaaactgccgatttcaggggcgggtgcattgtagttattattttaaaatagaaactaccccaccgactcatctttccttctctaagcacaaagtgatttggttattttggtacctgagaacgtaacagaattaaaaggcagttgctgtggaaacagtttgggttatttgggggttctgttggctttttaaaattttcttttttggatgtgtaaatttatcaatgatgaggtaagtgcgcaatgctaagctgtttgctcacgtgactgccagccccatcggagtctaagccggctttcctctattttggtttatttttgccacgtttaacacaaatggtaaactcctccacgtgcttcctgcgttccgtgcaagccgcctcggcgctgcctgcgttgcaaactgggctttgtagcgtctgccgtgtaacacccttcctctgatcgcaccgcccctcgcagagagtgtatcatctgttttatttttgtaaaaacaaagtgctaaataatatttattacttgtttggttgcaaaaacggaataaatgactgagtgttgagattttaaataaaatttaaagtaaagtcgggggatttccatccgtgtgccaccccgaaaaggggttcaggacgcgataccttgggaccggatttggggatcgttcccccagtttggcactagagacacacatgcattatctttcaaacatgttccgggcaaatcctccgggtctttttcacaacttgcttgtccttatttttattttctgacgcctaacccggaactgcctttctcttcagttgagtattgagctcctttataagcagacatttccttcccggagcatcggactttgggacttgcagggtgagggctgcgcctttggctgggggtctgggctctcaggagtcctctactgctcgatttttagatttttatttcctttctgctcagaggcggtctcccgtcaccaccttccccctgcgggtttccttggcttcagctgcggacctggattctgcggagccgtagcgttcccagcaaagcgcttggggagtgcttggtgcagaatctactaacccttccattccttttcagccatctccactaccctcccccagcggccacccccgccttgagctgcaaaggatcaggtgctccgcacctctggaggagcactggcagcgctttggcctctgtgctctttcctggggtcacctctgtctcctcttggccattgggttctcacaatccaaacccgcgatgcaaatttaggatgtggctgtgaagagagattctgggtggaaataaaaatactttggccttcctggtcaaggaccagggcagatcctgttgtagtctccgtgccccagggctggcctgagaatgagcccctgaaaagacagcgggtacgggcaccgtaagaacatcccctggtccagggtcctctctctgacaatatttttggtggccactggccaccctggaactgggggtgcagaagatttccccagtcagaaccccatttcttgagtcgcatagctgagcctggctcacacaggcaggcaccctttgcttagacttaaagactgctccgtcccctagcaagggacaggcacttcctgctcctccagcagggaatgtcggactgctggccagaacagcagtggcccagggattgggtgctggaggcctagtttttcaccgatgggcctggctttttgcaaaggctgggagggatttggagaggctgagcagctgggggctgaagacgggtggaaagcctcctgcccccaccaccccaacagcgccatgtgaatccaagaagaaggaagggcagggtgtagtcgtttttattctgaaatcccatttgaaatgaaacttgaaaagaattcaaaactgggtccagctgcagccacagacacactcagagggactccaggaggctggaacgtagaccagtgggcgctgagaacctggccggtgggggtaggggtcttgattgcagttttggctcttccacacccactgccaggcaggtgtactggtgcaggctctgagtgtgcttggtgtctgcatagaa

SEQ ID NO: 419 - DNA, 58613 bp, Homo sapiens
  source 1..58613: mol_type = genomic DNA
ctggggttgccaaacaacggaaattctaggaagacgtaggtgcggtttttaaagccttggcttgtgagcgttctcaggctggccggggcgctggtcttttcagaaacaaggtttgaatatgcaggtgtcagccaggattccttgtcgtctgcccaccgccgtttctctcccgggatttgagagaagcgggagtgtgtgtgtgtgtgtgtgtgtgtgtgtgtgcgcgtgtgtgtgtctcgtgttaggagaaaggtccgtggttgccgtctcagctggtttgcttactctctgcccccaggagaagtttgctcacttgggacaccagcgaccctcctcacctccacctcaccggttctacactctccccacttctttccaagtcgctgatgcagaaagcacttggtcaccttgaaacggcagctcccggaattctagttttgttttgcaatctagcagggctcttcggaagcctcataactgagatttatgggctcaccgggtaattaaatgatgttattgtgttaactttgcatgcattactgctgcccgcgccgcccgtgggccgccggccggccgcagctcgctggcgacgagggcactacagttgctctgaccgcgtagattatgcatgtcccggcctcgggaatttaccatgcattagaatacattagcgcctgcattttaaaaggctaaactattggctcccagctagggactctcggtaagtggcttgttagtgacgagtgtttgtctatactggcacatagcggagtcttttgctcccggcttactcgcctccaggaaagctttggggtgaggcgaaggcgattgaagcaatgccccttcccccagatcgcagctgctcaggggggacacagcacggcatctttcaccgaatctctctcgctcgctcgcactccagcctccctctccccagcgacccccccaccttctcctccctccctctccttgacgtttgattccagtagcaaaggaggtaaaaaaggcaccgagccgtcagccaaacctgaaaagtgcggccccgccccctccacagccactggtagcttcccgtggaaggcccgcctcccggggcagctgcggcctcggagtggttgcgcttggcgcccgtcgggcgtggccccgccccaggtccgggagggtaggttggctgccccggcgagcggcagagcccttctggacagctcccgctcacccaaacagaagacgtcggcgccggagcgggctcggacatggcgaggctgcgagccggcccgagcggcggggcccggtgatccctccctccctccccgtcccctcccctctcccgcacgcacgccccgtccgcccccaccccgcccccaccccgggcgagcccgcccgcagcccggggcgcacacccgcacgcgcactcctctccactcactcccgcgcccgcccccactcccgcagccgagccccgccacgcgcgccttgcccgcccgccggccgcccccgccgcccccgccgcccccgggccctgatggactgaatgaaggctgcctacaccgcctatcgatgcctcaccaaagacctagaaggctgcgccatgaacccggagctgacaatggaaagtctgggcactttgcacgggccggccggcggcggcagtggcgggggcggcggcgggggcggcgggggcggcggcgggggcccgggccatgagcaggagctgctggccagccccagcccccaccacgcgggccgcggcgccgctggctcgctgcggggccctccgccgcctccaaccgcgcaccaggagctgggcacggcggcagcggcggcagcggcggcgtcgcgctcggccatggtcaccagcatggcctcgatcctggacggcggcgactaccggcccgagctctccatcccgctgcaccacgccatgagcatgtcctgcgactcgtctccgcctggcatgggcatgagcaacacctacaccacgctgacaccgctccagccgctgccacccatctccaccgtgtctgacaagttccaccaccctcacccgcaccaccatccgcaccaccaccaccaccaccaccaccagcgcctgtccggcaacgtcagcggcagcttcaccctcatgcgcgacgagcgcgggctcccggccatgaacaacctctacagtccctacaaggagatgcccggcatgagccagagcctgtccccgctggccgccacgccgctgggcaacgggctaggcggcctccacaacgcgcagcagagtctgcccaactacggtccgccgggccacgacaaaatgctcagccccaacttcgacgcgcaccacactgccatgctgacccgcggtgagcaacacctgtcccgcggcctgggcaccccacctgcggccatgatgtcgcacctgaacggcctgcaccacccgggccacactcagtctcacgggccggtgctggcacccagtcgcgagcggccaccctcgtcctcatcgggctcgcaggtggccacgtcgggccagctggaagaaatcaacaccaaagaggtggcccagcgcatcacagcggagctgaagcgctacagtatcccccaggcgatctttgcgcagagggtgctgtgccggtctcaggggactctctccgacctgctccggaatccaaaaccgtggagtaaactcaaatctggcagggagaccttccgcaggatgtggaagtggcttcaggagcccgagttccagcgcatgtccgccttacgcctggcaggtaaggccggggctagccaggggccaggctgctgggaagagggctccgggtccggtgcttgtggcccaagtctgcgcgccgagtcacttctcttgattctttccttctctttcctatacacgtcctctttcttctcgtttttatttcttcttccattttctctttctcttccgctcttcccctactttcccttctcccttttctttttctttcttactctctccttgtccctgagctttcattgaccgacccccccccatttcattcgccctcccctcaatgtgccaacctttgccctatttccgatcttcccaggtactgggaggcgggatgggggtgtgcgttttcctctaggagccctgtctttccaagacccacagaaaccaggacctgcccttattcaaaaccccatgcacttcaagtctcttttagacaacacatttcaattttccgggctgactagtctccctgtgcagaggcagttgagaggctttgctctgcagagggaaaagagctctctactctcccacccaccatataggcaaacttatttggtcattggctgaaggcacagccttgcccccgcggggaaccggcggccaggatacaacagcgctcctggagcccatctctggccttggcgttggcgcagggactttctgaccgggcttgaggggctcgggccagctccaatgtcactacctacagcgagggcagggtgtaaggttgagaaggtcacattcaccgctttgggaggacgtgggagaagagactgaggtggaaagcgctttgccttgctcaccggccgtccttgccccggtcccagcgtttgctgggatttgccaggatttgccggggctccgggagaccctgagcactcgcaggaagaggtgctgagaaattaaaaattcaggttagttaatgcatccctgccgccggctgcaggctccgcctttgcattaagcgggcgctgattgtgcgcgcctggcgaccgcggggaggactggcggcccgcgggaggggacgggtagaggcgcgggttacattgttctggagccggctcggctctttgtgcctcctctagcggccaagctgcgaggtacagccctctattgttctaggagcacagaaacctcctgtgtgggcggcgggtgcgcgagctagagggaaagatgcagtagttactgcgactggcacgcagttgcgcgcttttgtgcgcacggaccccgcgcggtgtgcgtggcgactgcgctgcccctaggagcaagccacgggcccagaggggcaaaatgtccaggtcccccgctgggaaggacacactataccctatggcaagccagggtgggcgacttcccatggatcgggtggaggggggtatctttcaggatcggcgggcggtctaggggaacaattcgtggtggcgatgatttgcatagcgcgggtcttgggatgcgcgcggttccgagccagcctcgcacagctcgcttccggagctgcgagctcaggtttccacccccgatcccccgggctttcctcgcaccgctgagcccagcttgtggggtgcactcgaccaacgcccgacagggctggggaatgtgacaggcagcaggttcacccgggcttggggagggggagtttccgctttgacagcattttcctttgccgtctgctggtggattcctattcccagtcggtaatcgccccgcagtgttgatctaagaaggtaaagaaaactaggtttccctgcaaagagcctcccccaaatcggcggactccggatactttgagtggatttagaaatttatgtaatctttctcctttagtttatttttcatcctctcctacagttttctctgatttgctgttggttcggggcaagataaagcagccagtagagagcgataataatagcggcgggaaatgaactggagactggctgacagttcttaacattttgtcatagatccccccgaatgtcccaggctgtctctggtgggttttagtacccgccggcttcttgggcaccggggaccagaaggaacttggcagctggtcttaggggtacagttaaaggcaggatgacagctattctcctgctcatctcagagcgctgccgccccctcatgccggtcgcgcaaagaacacagcttttaaaaaacacgtgccttctgcccatataggtctgaaagtgatgaggaaagtaatgcttcgcctattagcgagtttcagcttttaaaatgatcccaagcgttgctgagatgagaaagcgtggcatcccgggggtcctcagccccacccgcgcccatggtgcaagtctgcagggacaggcccgggacagcactgcccacgctgctagattttccgcagaggatcgctgaagctgccttcgtgggagacagaatgcctcctccagcgagtggaaaaggcctgctgaggaccccgctttgctcgagcattcaaatgtgtgtctgttttattaccctgggttgaaaagggacaagagctttagcctttttatctggccattttatcagcaactacaagtgtgttgagtggttattattacataggaggcttttcagtttggggtcagtagatcagtctcttcagacactgatgcagaagctgggactggtaagtaggtattatgtgctcggagcgctaggggacaggagcaaatggagaagaaaagcggaggctttctccgcccggagtatcgatcggaatccccgccggtacgccgcagagggccctcgccgttgggccccgggggtttaacaagcccagccgctccgcaggcggctcggccggactctcagaccggtgcctggaagacaccgtccctgcccccctcccgccaaacctgcctcttctctttctctcataggttataggttccctttctctctcattttggccccgcccccgggtcctgccaaacagccaagcaggccggggtttagggggctcagaatgaagaggtctgatttggccagcgccggcaaagctcacccttaggcgaggtcacaacagaggcaggtccttcctgcccagcctgccggtgtagtcacagccaagggtggcacttgaaaggaaaagggagaaaacttcggagaaatttagattgccccaacgttagatttcagagaaattgactccaaatgcacggattcgttcggaaagggcggctaagtggcaggtggttgcaaccccgcccggtcgggccttcgcagaggttccccaagaccagcccttgcagggcggttttcagcaacctgacaagaggcggccaagacaaatttctgcgggttcgagcacacactctcgggcgttgggccccagagacctctaaaccaagcacaaacaagaagggagtgagagaacccaggctagaacttgcacgggcatcccactgaggaaaagcgaggcctcggtggcaggcatgttttcttccgacgcccgaaaatcgagccgagcgcccgactacatttactgcagaggtttccgcctccagtgagcccggatcccccagcggcctgcccggagctggtctccagtccccgccgtagtccgacgcacggccctctcctggcagcaagctcccagcggccagtctgaagccaattctgttcaggcggccgagggcccttagccaacccaccatgatgtcgcctgggccacctgatgcccgcagcggcgggacacggcccgggcagtgcgcagtggctcctgctaggggcaccgcgtgcgtgcttgtctcccgctgcgccggggacgtccttgggtgacacgggccgctgggcacctcccaagccgaggaaacggacccccttcgcagagtctcgcgcccaccccccaacctcccacctcgtttctcgctgctagggctcccgactcagcccacctctcctggcggtttagttagggatcagagctggagaggctgaacgcaacccgtgccagtacggaacagacgatatgtttgcctgctagctgcttggatgaataattgaaaagttcgctgcagtctgtgcttcgtcaagtcccgggtgccgggagaacaccttcccaacacgcatcagggtgggcgggagcgggcagaggaggcgggacccgagggaggagagtgaacccgagcaggagaagcagcccaggcagccaggcgccctcgatgcgagaggctgggcatttatttttattccaggctttccactgtgtggttatgtcactttctcaaacaaatgtgtatatggagggagatcgatgctgataatgtttagaagattaaaagagcattaatgctggcaacaataacgtaaacgtgtggacccagatttcattgatctggaacttgatccggcgcgtttccagtaagcccgacggcgcgctcttcccagcagagcgctcaccagcgccacggccccgcggttttccagcggtgccgcttcgccagctctgcgcgggttctcccgtctgaccgcagctcctcccccgcgaggccccagcccgccttacttccccgaggttttctcctcctctcgcggggctctctgccctctgcaccccctcccccgacctctgcaccacccgcccctgtgcgcacacaccgctacttgcgcttccggcgatccgcctgggcggctgggtccgcgaagccaatgcgctgaacggtgcccgagtcttcctaactatcctgtgcttggccgttgccactgggccctggtgactaagcccaagtttgaaaatgacgtggctaaagctgcctgctaacggcagagcttaatcagccgcagatcccctcctatcctcatcggttctcgtactaaaaaggctcacgcgcagactttttacgcaggtgcattcgttggacaattaaacgtggccctagtaacaaaagcctgagcttcatccctccgagtagcaggctctgcgctggactggtcgggtctaacagggagaatcttgtgtcctaccttggctgggacaggaagtaagagaagcaaactggggaacccctgccccaccccttcccaccccctggacgtcctgggccgaggcccgggtcactggcccatcgcgggtaaggaggtgtcctgtggaacacctgcattgactggaaaagaaagaactttaaagctcttccttcccgcttgtgggggacaccaccacaccctgccaaccactcccctggccaaatggtggcttgtttttccagaaggagcactaaggtgaattttatggaaaaaaaataaaagatcagggacctaagtgggagtaggatgagaactaattcttctgggttttttttttttttttttgaaattatgaatcccacctgttgaagaaggctgagcttttccaacagcgggtatcaatcgggagggaaagcagtgttttccagccctctccaagaacagtaattaataagaggaaggaaaagagagatgggaaagcaaatcgtgcattgttctgctttgagttgaggcagagggtaggctggtgtttcttcctcatcttcccactagtgttcttccttaaagaagggagctttggtacaccaccttggttcctagtcagaaagtgccctaccggacccttttaaactacaatgagatagctgggtaatcagatatgtaactaaggaggagagcaggtggtttccctttggtctggcggacaactggctccctccccacagcccccacttgaaagactcctaggccctgggaggggcgagtgggcctttagaggatagaatcatagactctctcctactcccatcttagaattccaagattgggcaggattcctggtgaatggtgaggtctgggcaaaggataaactgattaccccagattctctgtccctacaaggcaccagcagctgcttcactctccttttgagccaggtctgccctgaggtaacagtaccctaggccagttttaccatcccaagtgccagacttcagccctgagggaaggagagccagcctctcctgctgtcttcaaaccaaggcttcattttacagtcacccccgatatgagagagagcctccccaccaggttttctggcctttagacacttctcttcaaagaagagaccagaggaacaggactgaaaaactctcaggaagaaagtcctgggctccacactccatggctagtggctggatttggcagaaactgtcttcatgaaaagtggtatcatggagggggatccctggagcaaggaagacctcaagggagaagcagagagatttagtttctgggttcttgccaaaggaagggaaattaggagggaataaatagaaataattgcctgtataaagggccctggggaggagggtgaagacagaggcaccctaggccttaaacttcatctagactccctgggctgtgctgacttctgacccttttagggacctttgtttttgctgacttgggaaaagttgcttcctccagggagacaactcttcttagaggggagagtccataatgaggaagccctctggggtgatttatttatgctgtcaggtatagagctccgtcaggctaactcaccctgtggggccctatcaccccctcttatcacccaggctttttccctaaccaacctctgtgcctttgggggaaaggctttttgatttcccagtctcattcaaggcaatggctgaaaaatgtgcataggtttttctaggggcaggtggggaaaaggtagggacgtggattgtgtgacccagcccatctaatgcctgacatggtgcagatgggcaagacttggaggcaggctgtgggctgtgcagatagagatagcctcacttcgggagcaggattcctagaagctgtggacgtttattatgaaaaactgtcccacacaaattgtcccaaagggcagggaggctctgcattccacctcggcacctctttcaccatttgaggacccattactcttctgtagaaagcagactttgtttgggttggaagcacacctccaatgtaatttaatcagcattggactttggctcttgtaatcaaatatacatatactttctcctgcaagaagaaaaataatttctctgtaactggtattgacttgaagtcatgtaatctctggaaagcatcacatttttaaagggaaaggtaaaattaaggggaaaagaacccgcagtgttagtggtttgctttgtcatactaagaagagccagttaccacttaagaaagggcagaagaagcattcctagagcataaatacttgtgctgctccaattgtagatatttcatttacagttttctctgtgcaatcagccttggagatggttaaggataggaaactaggttgactggctcaccaaattctagaatgtgggctttattacttatgttgcattgacatccttgaaggaacctgtttgacggctcatttttctgccgtatttggagaggccacaggcagcagcagctccttgagttccagcaggatctgggtgggtagcaagcctttccttttaagggtgattggcagccattggcagcttgcttcccactccaccccagtgcccttgagcatgaagctgtgccctactgcgtcctcctggagcaagcttggagtccccaccccccagggtgaggttctgggctttgcccaagttgagtctgctagggaatctgttgtaaacacagatccattgatttgcatttgtcagagagtaaagttaaaccagtgaaaagagaagcccttatccttttatgcagggccagggaaacctttcatattgatcctattgatccaacctttccctttaaggaaaccacatagttaaagaccctcgttcaatagatttacccttcgtgcttgtgatattcctttaagtgttctcatctaggatagctgggcattaagcccacactccaaaccaaacaaaaatgggaaggggggtgggaagagagggggtcaggaggcagaattgtgggaagtgaaattaaatcaaactgaaatgtgtaatgacccagttggggatgtttttctcattcttctaaaatgacatgcagggataaagacaaaatagatgcatttggcatctttttttttatgagaaaagaaaatctgtttatatgcctagagtaaaaatgtctcaggaacatcattttctactgtaaaattatttcaattaagccaccagtttgcttcattaagattggttcacttaaaagcagtgatgttgccacaattattttggttcatttgtagcaaatcagaaaaaggattctccccagaaatgcaatattttggactctgtatatgagcataaacactgaagtcacttgaaaagagagaggatttggagtttttgtgttctgctggatgtgggaagcaacgggtagaacttttgttgtggagcagagtagacgcaataggaattgccagatattgctcagtatccctcttgcttgtagatatgaaaatgtaagtctcatttgcctccagaaccatcggcacaatccatttcatttcttccctgatccttttttcctgtctaaataacatccatttgtgatttttttcaacacggtacatgacctgtttctaattggctatctcttgggttgtttttgtacattcatgtttgttttatgtgattgaaaaatattaatgatttcgtaggtgagctaatgtatttatctgctgagcgagttcaaagggcagagttcagctatggttcaggttaattgaacaggaagcagtgagctctccaggctgtgttgaacaagggatcagtcccttaaaatatcacactcagcaaacacaatttcactgtcttcatcctagagtctgatgtaaaaggctcagatcaacttggatcacttgtttaaaaaaccaaagcaaagcacagtaactgcagcaataccctggagtccccctcggggaagaagagttttctcattggctaattgctttattggtagcactgacctgcagagcagctgcaggagcctggatgaaggcttaggcctcagaataatgtgctccattagaacagggcaaggcattttttgtttactcaattggagctccctgcaaagtgccattaaccccggcccaactgcttgtgtgctgcaaaagccaaaggtcacgccagtcagtctgtaggcatagcagctctgccctggtaggaaggttggggtcgcatcctgctggcactgccctcccaggggctcgggccagccctctgggccctttccagagttttgactaaagcaagcaattgcacaacttgtttacatttcccaactgctgaatcatgttttgatgattaaacagttttgatctgagcaccatcaatcacacacatacagaaaatccccccactgcccctctattttctatttatgttctcttcattactgtgcattacagtaaacagaattgtgcaaacggtgcttttagcaggaatatagttctgataagtgcttggatcaaggggaagacagacctccaaacatggctggggggctgtttggtggaagaaaggtttcaagtggagtcggggagcacagtcagggcttccaccgccagcaggtgaactagagtgccacctgccgggagtcttctaactgcactaagccctgcaccttccacaaggtccaagccccttccttcactttgttcctaatatccttgtccccattccccaccctgcagatcactacccatgcaagcattatcttcctagaagtagcttaaagggctttttcctggtcctttgaaactgtaacctctgcctcttctaattcattgccaaggagaaatcaacagttctgctgtcataggtgaggtgatttgcccatcctgcacattgaggtaatagtctcctgcttagttggactgtgcttgggggaagagaagcaaagaaagcaaaaaatagccgtgggagggaaaacgaatgattatgtgtggaagaaaaatggctccgttgattgtgccagtgagggctgtgccaactgtaaggtgttctgcaaagataaaatattgtacaaaggagagaggatgggagagaattagcatctacagggaggacatcgagaaagagatatgccaaatcagcaaactcgagtttaggctttgtgaaatcccctggaaagagaaaaagtgaaccagccgttttgcaattgcaaagaagtgagccagtgagctagacttcgagccagactgtggagctggctgtagctctgtgggtggcagctatttccacacttgcttcacatggacccctgcctggagcccctggtagcagagcgcctgtgggtgggttgctgcctccacgccccggcgcaggcttcagcaccacgaacagcgccatggaggaacgctgtttgagcgaattggagatggaccctctactgcggttaaatccaggcaagagcctgaccagtatctccagctctgtaggtctcagcgccccagtgcagggcctcatattttcctctggagccctgtggcttttcagctctctgtgtgagatcagcgataataaagggaagaggaggcggcatctgggtgagaagacaaaagatgctgaaagactttccctctgaagaggaagagcattaccaccgctggggggcgggggattgaactatttttctccatgttgctgccttctgcaggcatgattgccaccctcaacgggatgttttagatttaggatttcctttcaagtgttactgtctgcctgcccccacgccccaccccccaggtatacacaaacggatgcttttgtttccccagatgcatgctcctgatttttgaaagcatgacttttattatattaaacaatattctcacattatagcagcagtaatgtcacaaggagaaccaactgtggagcatcaccaccttcgataaatctagaaactggatttgatttcttgagagtctagtgatgaggctctttttaatgaaaaccttgccactgcttctgtccctgaccccctacgaagggccagagatgttgagtgacttcctccaggccacacagtggagtcatatggcactggccagggtgagaactgacagtaggcactgacccctgactctggcctttttcaatcagttgctttgctttatttctggttttattccagagaaaagagataggagagtccttttggtcaatgattgagcacaactcacatctctttgggtttcgagtaaaatggtccttgacttcccaaagctaattaaaatgtaaaactcttgctttatttcaaataactttagttcagacctaatttattgctaaggtggttctcagggaggtagagcattggaatagacaagtgtgtctcctttaaaagtcaagggtatgataaatgagaattttttttcccctgtgacaatttatcttcaagttccaggtggccctttgtgtaaaaggagggaaaatccatcccaaaacaaaacaaacctggtagagcattcaaatttgatgttgaaaaaaattgtttctgtgtgtctaaatgcccaaaattttgttctaaaaatgagcaggaacatatctgaatcagatataaaaatgggtgttaaatgtattttgtaagctttgactaaagaagtttcttccagctgtgtagtcttcgaatctgtggacgtgcctttctcaggagttgttgggttccactgtcaaaaccttttccagtaaaacatggatttggcaacagtaagtgtagcctttttggcctactttatatgcatcactgcatcttactaaaatgaggcattacactctacaaggacttgtactgaatgcatttcctttgtagtgaactcaatatgcttttgaaaagatattttacagaactgccacataaacaagaccttttctattatctgttttgaccctaaatactgaaaagtgtgtggagtaagataattttatgcttttctgaatcagtgccatagatccccaaacctaaaagatgtaggggaaaaattcgtcttggatgcaattgcctcctaatgtataccagagttcatttctgttcatgttcaagggacaagagtgaattctgtattcactttcaatgactaacccttctcatcctttccttcattcttctgaagaggaagaggtggacttcctgttgaagaccaaatcctctcctgccttctcaggaccccatgcttcctgtatatagatgtccctgcttttgtgaagttttctctgtcctcctaaattgggatctctttggaccatccctccctttgcatttagaacatagataggtatcgcctgctgacttgtcagtgtcagcccattagattaagatccagaagaggaggttagatacagcatacaggaggcagccaataaatatctgtgaataagttaataaatacttttcttttatatgacactgtttctacccattgtatttcccccatattattgtagatggcatctgagtaggaatcatcagccccagcacatcatttaggagaagcatttcacaatgtcaagttctcatcaatgtcattttcctcccaaattacgatattataactatgtattaattttaagggaatctcaaagtaggattgagtcttatccaaatcttcagattatcgccagtggagcaagagatgtgaaatgatcatcactagactctagactaaggacccattttgccaattggctctagttaccccaaagtaaccctccccagtcagtcagttctcctcgttttcctgctcaggcattgtcctcactgtcctgtccatgtctttgcacgttctgttccttctgcctggaattccttatctcatcagtccttctccaggtcctatcattcctagccacctccgatctgcctctgaaatcttcccagctaactttggcccattcctttctgtttctttctgaactcgatttgcaatcattgcaaatgacagaacagccttgttggctctggtcttacactgctctctaggtcttttctgtgtctccctttcttccccatggctctggaggggagatagcatatctttgagctccccatggactgctggtccatggctgaacccacaccaggtattcttttttgagtaagtcatttggtggcctcctgtctatctttacagaagcccctattctcaacgagagaataggttgggtatgtttacttacatctatcattcttttctagcttcttctctcaaaagggggtattcttttcttattttatttttttgatctggagccgtactttgtcacccaggctggagtgcagtggtgcgatctcggctaactgcaacatccgtctccagggttcaattgattatcctgcctctgcctcctgagtagctgggattacaggcacctgtcactatgcctggctaatttgtgtatttttagtagagatggggtttcaccatgctggccaggctggtctcaaactcctgaccttaagtgatccacctgccttggcttcctaaagtattgggattacaggcgtgagccactgcacccaacctgaaaaaggggtattgttttctataaatgctttggtcattgttggaaatattggctacataatttaaaatggatttctatgttaatctgaaatgagacataagcttaatatagagaaacagggcttgtgatgtcttcgttaatagcaaaggttgttctgcttcatacaagatggaaaattttacccacctcagggcaattgtgccagcaattatatcagcaaatcagagggactgctttcctattttaagtcattttaattatcagtaaactaaacttgcatctaaacagccattacttgagatactgcaagtgcttaggttgttaataacgtaaagttacctgtgaagaaaaaaaacagaggttaatatttttatctttttattttattttaattttatattttattattttcctttgatgaatccattgctgcctacactgtactgaactaagtagttgggagtgaaaatatatgaactagcccttgtccctttttgactttactgtatatttaagatttgaatggatacatcctcacttacctttacatatccatatggaattgagtgagaacagagtttattactatgtcaactttagttggaaactgaaactaagatcatttatttgctatacatcttacgtggaaattatatattagctcgtgatatttcatcttttttacagttatgttttgacgttcatattacatgagtaacaaattatgaagactaaccatttatgaacagaatttagtgttaaatgaaagcattccagatttttattttctgttgccttgaattgaatgcattgctgtgctgcatgataactaggtaagcaattgacctgtgtgactgtcatttctgtgccttgcataaccaaaccaagtttcctctgacactgaggcagagacaggcagggttgcgctgggcaggaagcagctctgaggcctccctgaagggccttagactcccaatgggggagtcagaggccaccctgttctctggctacggcaccatagcctagacatgggtgtcaccaaaggctatacacttctttacctccttttctgccctcttcctaaaggaagcatctggaaccagaaggagtccatatcgctagccccactcctccctaaccagttctccatcccgagccttagattcaggcttgcataggcagattctggaaagtccattaaaagggcaggatgtggagtaaataggtgattggattggagggtaaagggcggaaaattcacagcagagacaggtggacttttctaactggataagctacaccaactcatgaatccaagtattccacccctggaaagcaagaggtgaaagcaagttggttccattggtgaaagcaagtcacctgcctgagcccagagacagggtggaaaggctctacaaagttacatggcaggaagcatgggcacagaaaaggcaagcatgaggaatggggggggcggtgttggtgtttttctttgtttgtttgttttgttttgtttgcattctacctcatgccatgtattttagctcatttattcttggaagctgccactgctatggtgatacacagacatcaaggatgtccaatagtatagggctaattttggcaacacagaagataagtgtgggggtatttcacattcataagtaacaaacctatgcccacctggacaggaaccacgcctctttgtattgagactgtttgtgacatgcttgatcttctcgactagatcatagcaagcagggaccctgagctttgttctcctgcatcttccctttagccccaccacaatgcctaacacatagtttgcacttagtaaatatgcaaggataaatgatccccagaatcccactgctctagtgtcccaatgggagatcccctcaagacccaccaggtgattgcttgtagctcaacctgtattttattttattttattttattttattttagagacagagtctcactctgtaacacaggctggagtgcagtagtacaatcttggctcactgcaacctccacctactgggttcaagctactctcctgcctcagcctcccaagtaggtgggattacaggtgcccaccactatgcccagctaattttcatatttttagtagagatggggttttgccatgttggccaggctggtctcgaactcctgacctcaggtgatccactcaccttggcctcccaaagtgctgggattacaggcgtgcgccaccacgcctggcctcaacctgtattgtaaaatagggtttcactttaaacttttaaattttgttctactacaataattaccaaattccaggggagcaaaggtccaagcctgttgcctacagaattaaggcatccaattcagatctcaattattttgtgttaagaaaatctaaacaaagcaaacactgcttagggtttaccaatgaataaagaagcaagttggaagggatatcaaaaagatcaaaatgtttgcgcatttataactttaacaatgtctaagtttttttaaacttaggttctacatctggagcatacttttttaaaaatcataagcagtgttaaaaaatacttgacagttttgtcttgattcttaatgtgggtgttaagggatgccgtccattagtgagtacaccccagatcatgtgtttattgcatcctccttcttccctgcctgtcccctaatgatctggtgcacagagggctacttgagctgagttatatggatctcagttgctgtcatttgcacatacttaattcagagaggtgatcacattgatttccaagacccaatttttaagacactgtactcacgtagatatcttagctgctctgactatgttgtctgaaaaggaaaacattttaagcctttggaagcaattttgatggacatttcattgtgttctatattactcacataattaaatttccttcaagtcaaagtctgtttaaaattaaattgagaaatatttttgagttccatcaggcagataactttgtttagctagatttgttctgcattcacatgaaatggcgtcctacgaatcaatacccagtgctcacagttcccctgaatgtgaagaaatggcacccttagtagttcttgtgtttttatgcctatggttttgcaggctggtttattcagattctgagcattgtgaactaaattcataacttctttcatgcattagccggagtcataggactctgatttacagactcgcagtccagctcacagcggctagctttctttgggtcataccagagtttcatctgcatggccaaaggggtagaattccaacttgggtttgaaagcaaataggataaattgtcagaagatgtattcctgtgtacatctttggaaacaagacataggaacaaacccttatttttcaactccacccaccctgctactgaggacagaagaacaagccctcctcatcttttatcctgcctctccttgagacagccattccattaaattctatggcgagggaatctatggtgttcgagctgtaattgaagaattagcattccataaatgctgccttaatttttttaaaaaaattgttccaaagaactgctttttgttgcattgttaattagcctttgaacatttttgaattcattataaccttcaaggtctgccaaggtctttaaggtttcttctttatggctttgcctctaaataacaataggtacattgtaaggttattgtgagccttaagtaagttaatgcatacagatgcttagaataactggtaaatagtaaatacttgctaaaatatctgccattattgattgattgattaattttttgtaacttctccatatatcagcaggaaatttggcctgagtcaccaatgttcccatagcttttatatattaagaatattgcttggcattgtcaatgacagcatgagccaaacagatccagtttgtatctgagccaccatttactagctctgtgatgtcaggcaggggacgactcttgaagagcctcagttccctcctctgtaggaggaggacaaggtaggtcctgacgttatctagttggtgtacagattaaatgagacgccataagggtatatggcacctggtacattgcctcctatctcctcagttttacagctaacatcctattacacatgggccacatctgtacttcaacataaattttttgtcattttctcagatgagatttaggatgagtgagattgccagactctacactcatcactgggcatgctgtttgcaaactggccaaccatgcagccggactatttactccccacccccaatgtccttttaagactcccttaacagttatggacattttgctaagctcgtgcttagaacccagaagttgactgtgcacacagtaggttctgactgaatccctacaggcttagattggaatacagtccattttgcaagtgtggtatgtattgagcagacattctgtatttgatggaagttcacatataaaaatggcaactgagccaacaaaactcacatcatctgtctctataatgatcacaggtttggggggccttatcagaaagttatttttatagacaccccggtggtcatgagatttaaaatgctaaggagaatggcttcctctttaacctcttttctgtttttgatatgtctgggccctgcttctttatcttgttccccaaatccattcacttaggttctgacttggctccctggagagctcctgttttggttcacaccatcatctttattcccaaattaggatccttaacaagaaaagagaaaagaaagaaaacctgtagacatccagatgttgctttttctgaagtaacaactttatttgataatattttgaagccatgggccaccgaattctcaacatgcaagtttatttaaacagtctctagtatcctttcctgaccccaaattactttcaagcattaattgtcctagtggtttcatggccatattatttcatattcattagtgttttcatgaaaaattataacactaattagagtggcttccagttaattcacttggtgattcattactctctccttcttggtgatctgcatgtggtcatcctggagaaagcatccaagggtaattgcagctctattccctgagtgattgcctaatgccattagttctgatccacaggagcatctcgggaagctctgatggggtctggttacagctgcacccttgtcctgccctttggatgcagggagaaagggaagcctgcagtgaggactggtcctccggaggggtctagggaaacagaggggagggacgtcttagggaaaaggaagtaggggcaggggagggagttcagggatttgaacatcactttaacatcttctagaacttgggtaaggacagtatagagtaaaatctgccctgagaacttgcacgtagagtaaggaaggtggtttctcttcagtttcagcagacttgtggccaggcactgagctggagtttggaaacccggttccctctcagagctctgacatccagttcttccaactgaaagtttatttgacctcattcccattaggatggctgctgtaaagcaaaatgaaaacaaaaaataacaaatgttggcaaggatgtggaaaaattggaaccttgtgtgctgttggtgggactgtaagatggtgtagccactgtggaaatagtatggcagttcctcagaaatttaaaatgtgagttatcacatgacccagaaataccacttctgagtatacactccaaaagaactgaaagcagggtctgaaagagatatttgtacacccgtgttcactgcagtgttattcacaacagccaaaaggtggaagcaacccaacagttcatcaagaggtgaatggataaacaaaatatggagttttcatacagtggaatattatttagccttaaaaaggaaggaaaatctgacatatactatggtctgaatgagtcttgaggatattaagctaagctaagtgaaataagccaatcaccaaaagacaaatactatatgatttcacttatatgaagtgtctagaatagtcaaactcatagaaacggaaagtacaatggtgcttgccaggtgcctgagagagggaaatggaaacttgtttaatgagtatagagttttagttctgcaagatataaaagttctggagattgtacaagaatgtgaatatacttaacactatggagctataaccttaaaagtagttaagatggtaaattttgttgtgtatattttaccataatttcaaagaaagattgtttgttatttatattgtattgcttgctcaatttttaaaaaaaattaaaaatagaaaaacaaaaagccaggtgcggtggcatgtacctgcagtcccagctactggggaagctgaggtgggaggattgcttgagcctgagttctggactgtagtgccccaggcccatcaatgtcctcactaagttcaccatcaatacggtgacttcctgggagtggggtatcaccaggttggtgagggaaaaaacaactactgccatgttgctttcagttcttttggagtatatactcataagtggtatttctgggtcatgtgataattcacactttaaatttccgaggaactgccatactatttccatagtggctacatcatcttacagtcccaccaacagcacacaaggttccaatttttccacatccttgccaacatttgttattttttgttttcattttgttttgacagcagccatcctaatgggaatgaggtcaaataaactttcaactggaagaactggatgtcagagctctgagggggaaccaggtttccaaactccagctcagtgcctggccacaagtctgctgaaactgaagagaaaccaccttccctactctatgtgcaagttctcaaggcagattttactctatcctgcccttaccccaggttctagaagatgttaaagtgatgttcaaattcctgaactccctcccctgcccctacttccttttctctaagacgtccctcccctctgcttccctagacccctccggaggaccagtgctcactgcaggcttccctttctctctgcatccaaaggtcagttgtgtttgctcagtagtgggatactgcctgtgaatagccactgtactccagcagcttaaaactccatttcttaaaaacattttttatcaaaagttctgccactccactattcacaatagcaaagacttggaaccaacccaaatgtccatcagtgatagactggattaagaaaatgtgacacatatacaccatggaatactatgcagccataaaaaaggatgagttcatgtcctttgcagtgacatggatgaagctgaaaaccatcattctcagccaactatcgcaaggacagaaaagcaaacgctgcatgctctcactcgtaggtgggagttgaacaatgagaatacatggacacagggcggggaacatcacacactggggcctgttgtggggtagggggctgggggagggatagcattagaagaaatacctaatgtaaaagacgagttgatgggtgcagcaaaccaacatggcacatgtatacgtatgcaacaaacctgcacgttgtgcacatgtaccctagaatttaaagtataataataaaaaaaagttctgccactcaaagagaaccacattaatattttgcttttattaaaattatttttaattatttaagcaatgcattaaaacattctacttataaaaatcaaaacattaatgatcagaataaagtcctctttgcctatctcctttaataccagtcttcttcattacttcccagcagtaaccactcttctggctacaaagagtgggtctgccaatccaggcacttccagtgcatttatttacctacatatgtactcatataaattgtataaataggtagaaagacagatagatagatcgataggtatcttaggtttgcgtattgttttcacataagtggcatcacactgcatgcatcattccaaagctccttctttcctttgatagtatgcctacccagcttctacatataaatgaggttcttgcaacccacatttattgcatagtgtcctatggcatgactattttcatttatttagccatttctgttttgatgggcaattaggctgtttaccatttttggttgtttgcattatttgctaagcagtgatgagtgaacatccttgtacacacctccctgtgtacccatgggaatgtttcctagggtggacaccgagaagcaaaatgagaggtcatggagatgcacatactgtaattttgataggcactaccacactgtcttcgaaattggctccccatcagcagtggaggagagagctcctatttccctgacacttgccagaagttaatatattagccattttacttttttttgcatagttgctggatttaaaaataacattttgtggttgctttattttgttatatttttatgatttctaatgaaccttgatataatcatatacttgctggtcatatatatttccttttctgagaatgtcctgttcatatccttgtttggcattgttttttatatattctggatgcaaatttttgctttacaaattacaaatgtggtctcagttctccagttaaaaggcataaagtgattgaatggttaaagaaacaagacccatctatatgttgccttcaggaaacccacttcacccataaagacacacatcgactgaaagtgaaagagtagaaaaaatatttcatgcaattggaaaccaaagaagagtgggagtaactatacttatatcagataaaatagactacaaatcaaagactgtgaacaaagatgaggagggtcactacgtaatgagaaaagggtcaatacagcaaggggatataacaattataaatatctatgtgcccaacactagagctcccaggtatataaagcaaacattaatagatctaaagggagggatagactataatatattgaaaacattttatcccatggtattattttgaaacttaataaggcttcttttaactttgatgtatcaaattcatcttttttattatttattttttatgagacagagtttcactcttgtcgcccaggctgagtccaatggtggtgcaatcttggctcactgcaacctctgcctctgggttcaagcaattctcctgcctcagcctcctgagtagctgggattacaggtgctctccaccatgcctgcctaatttttgtatttttagtagagatggagtttctccatgttggtcaggctggtctcgaacttctgacctcagatgatccacccgcctcagcctcccaaagtgctgggattataggcgtgagccaccatgcccggcccaaataaatatttttgttgctcttcctttactttatgtgttttgcttcttgggtcatttttatttattttatttattttttagaggcaggatctcactctgttgcctaggctgagatgcagagccccaatcatagctcactgcaacctcgaactcttgggctcaagcgatcctcctacaaaagcttcccaagcagctaggactacaggtgcctgccacctcatccagctaattttattttatttttttcatacagatggagtcttgctatgttacccaggctagtctcaaactcctgagctcaagcaatccccccacctcagcctgtgtgctggggttataggcgtgagccaccatgcctggccttgggtcatttttaaacatttgaatctttattctttaatttttctgaagttgctttttataaattatgtgaaattggaatctatttttttaaaatctcaaatggatagccaactaatccaacagtttctgaacaattcatctcttctcactatttgaaatgcaatactttctttataatatattatattcccttatgtacttgggtcagtttctgcactccattctgttccatggatctattaaattctgtgtcaacgtcatactatttaaattatttttgctttatgatatatcttgagctctaataggatatatattttctctcctcatcttctgtttctacatcttcttagccttccttgtattttcacttttccataggaattatagaatcagcttgaatttatatattattttgatcttctcaattatacatagggcacagagttctattcattcaaatcttttttttttttttttttttgagatggggtctcactctgttgctcaggcctgagtgcagtggcacaatcacagctcactgcagccttgacctccctagctcgggtgatcctcctacctcagcctcctgaataactgggactacaggcacacccaccacacctggctaatttttttgtattttttgtagagacagggtgtcactctcttgcccaggctggtctcaaatgcctgagttcaagtgatcctcccacctcagcctccctggcattatggcgtgagccaccacgcctggaccccaaatctttatttatgtcctcagcaagtaaaaataagttttagttttggccttttgatcttttggttagagttatttctagctacttgttactgttgtgaaggtttttttctgttgcgttttggtttcatagttctttatactcaagtatcctaaccactatagtttagtgttgctgttttttttttaacttcatataaacagactcactatatgtgtattcctttgtgtctgatttcttttttccaacattatcttcatgctgttatgtgttgctgcatgtagtagcagtcattccttctttttcataactctataatattccactaaactcatatgccacagttaatcaattctcctgtcaatgagcatttggattgtttccagttttactacagagctgctctgaacattcttgtacatgtacatgcatcctaatgtacttaaccatacatttctgtggggttttcttaatttgagtttcttcagaagcaaaccctaaaacaagaattcaagtatgggtagtttatttgaaaggtgattccagaaaacactagtaaaagagtggagaagcaagacaggaaagggaagaagcccaataagagtcacttcatgaagcacattagtagagtgggcaaatggagcttaatcctgctgagtaactctgtgaaactccagagaaaatatgccttagagttgttccagctgaagaacaagggtgctggggtatttatctggcagctccaattattccctaattgaggaaatctcctggacccttccccagcccttctggcctgcactgcatgtgggcagggcaggctctggcagccagacaaagccctcaggcaaagagctgaaggtactggcagttagaagttgggctgtcgtgccccgcagtggtgaaggccaggagagtgtggcagcacatgacagagtctgctacaagagagtctttccatgagcagaatttctgggtcatagggcacatatatattcaaccattgcagatactgccaaacagtcttccaatctgttgtcccagtttgccctcccaccagcagcctaggagaactcccgcaaggctgtgtccttgccagctcttggtattgacttttacatttaagccattttgataggtgtttaatgttgtctaatttgcaattcctggattactgataattttgagcatcttttcatgtaatttttgaaaatttggatttcttctgtgaagtgcctgttcaagtctcttgcctgtttttctattggaatgtttggcatttccttattgatttccagaagattttatatattctggattcaggccctgtggcagacatatgtgtttaagatatctgtggctctcctttttactgtcattcctgtcttttgaaaaacagaagttcttaaatttttttaagagacagggtctcgctctgttacccaggctggagtatagtggtacgatcatagctcactgcagctttcacctcctgggctcaggcagtcctcctgcctcaaccttccaagtagctgggactactataggcatgcaccaccacgctggctaacttcttaaaattgttttttgtagagacagggtctcactttgttgcacaggagaagttcttaattttaacgggccccaatatataactatttctctttgggctagtactttttgagtactaagaaatctttcctgtgattatgaagaattaccctatgttattttctttctttttttttttttttttttttttttgagacagagttttgctcttgttgcccaggctggagtgcaatggcccaatctcggctcactggaacctctgcctcccaggttcaagcgattctcctgcctcagccttccgagtagctgggacaacaggcatctgccaccacgcctggctaatttttgtatttttagtagacacggagttttaccatgttggccaggctggtctcgaactcctgacctcaagtgatctgcccgcctcggcctcccaaagtactgggattacaggcataagccactgtgctcggcctaccctatgttattttctaaaaactttattgttttgccatccatactaaggtctgtaatccatgcagaacttattttttgtgtatgacatgaggtaggggtcaagaattacattgtgacacaatgcctatccagttattccaactccattacaggagagaacacatgttcctcatgttctgcatatccaaccttgtcattgaatccagtgtccatatgtgtatggatctatttctgggtttctgtccttttccactggtctggagttgtatgtccttgctgcagtattacaccatctattgtagcctcattaaagatcttggtagttgaaacagaaagttgtcctacgttgttcttcttcatctagaatagcttaactgttcttcgatttttttgcattcccagttaaatttcagagtcagcttgtcaaactcaaactttctttcctttcctcttgaaaggaaggaaagaaggaaggaagagagggagagaaatctgctgggattctgattagagattgcattgtacctgtagatcaatatggaaagaattaaaactcttcacaatattgagttttccaatcaatttatttaggtattctttaatttctctaacaaagttttgtagttttccctgtcaatgtcttgtatacctattgctagatctattctatgtacactcttgatgttttgatcctattgtaaatgatatcattttcatttactgtttgatgtgttatggagaaatacaattgattttgtctactgacttgagtcttagaatcttactaaattctcatactaattctaacagttcattgtgtattctcgtggatttttaagtacacacaatcaatattgattttctatgttcatcttgaaactggccaccttactgaacttttttattagttctagtaatttgcctttcaaaatcttgagttttctaggttacaaaaccaaaaaaaaaaaaaagtccctcatattaacttataattatgaggattctgtttctggctgaagacgctgttaagtaaaagaagtatggagtcacactacctgaatttgactcccagcctgttatttactatgtaactttaagtaatttgcttaatcctctgtaccttggtatcattaattataagctgcctcatagggtggttgtaataattaaatgagtttatacacgtagaattctgcctgtcaaataatgagcactcaacttatgtaagcttttgccatttcatcagtttcctaaattcctttataaattttctttctaaattttcacttcttatttattttttcttattttattgtattggctccttttccgatataacattgaatcatagtggtgcttacacccctcatctgaaatttcaacactttgaaacatttctttctagtattttttttgttttttgtttttttgtttttgtttttgtttttttatataggcatgttgttttgttttgcttttcatgtttgacgtatctgaaattgtctttgactggacttccaaatctggtggtaaactatgcaagacagagatacttttccaaaggaatgtcttttgttcaaactatattattcacataaagatgaaaagtaataacgaaacaatttgtttttaaacattgagatttggttgtgaatggagacaccgaccctttttccttcctgcagattcattagtgtagtcttaacaaagaggtgctcttcattcatgtaataaaactttttaggatgtttggaaggagctcagggatattcgtagccacatagggctgttggccaattcttttttaagacaatatcacattcttgagcttttaagtttgattaaattcttagtaagctagagtatgtcttcaagttattttcatagaaaatattttcatagaaaattttcatagaagttattttcatagaaagcctatagttagaatttttgagtcattaaataactaagaatgcctttctacgggaaagaccacctgaaccacataaaattctagcattaccgccacagtgtcagttttgctcttaatttcctccaatgccactactgtatttctcattttcctgcaaattttaaaaatcttactcctctttttttgcggggggcgggggttgtttgtttgttttgagacagggtttcattctgtcacccaggctggagtgcagtggcatgattgtggctcaccacagtctcaaccctctgggctcaattgttctccctgcttcagtctcctgagtagctgggaccacaggtgcacaccacccacgcctggctaatttttgtagtttttgtagagacagggtttcgccatgttgcccaggctggtcgcaaattcctgggcttaagcaatccgcccgccttggcctcccaaagtgctgggattacaggcatgagccacctcatccagcccatcttttgtcttactactttttcattacatatggttacttacaaattgctattttcttcttaataattttctgttcctgtttcataaaagccacctctttttgcatcatattgttatatcaaatgattctctaaaatgttctttaagtttctggaagatattatctggtaaattttctctggttttcagatgaggatccctttttgtcttctactattttttcaattgtctctttttcctgtttattcattctcaaatgagaagagacccattctggcttgccatggtcaatagaaagggtgtatgttttgctcatgacctcttttctggatgttagtgcactcattctctaagccctatactaaatcgccagttgatacacctaaccaagcttccatctaatcagcttccttgttgtgtggccctgctgaactgatgtgcactcatctcctgcatccgatcctgggatgctgagaagctgatcaaatggaatacacacgacaacccccggtatactgcacatcgagggctcctcttgtacctgtgctcaccctgagtgctctggaaactacttctccaagggagtgatgtaccagccttggtgtccctcctccaccctgcagttttgttttgttttgttttgtttttttgcctagttgttttctgagagttgcagttcttaattggcaggtggaagggagtggggagtactctggctctttcaaaaggcagcacctaccaagtagatggatggctgctgaatttaaatttctcaacagttggaggactcagatgttattttttcaatcctgatgtcccatttcaacccagttccattggccttggccttgtgtttaggtaaaaaatctccagatcccccaaaacagactgactgcagtcctggtttttggtgtgctaagttttgtgtttcattacaggacttcgagatgattttagcagaaagttgaagaagctgccccatgctctcctagccattttaagccagatgtttgtatctggaattaaatatttgttttagcaactcacgacttcctggatggcttacaggaatgcagcttggcagcagagctaaagatccctctttgccaggcttctgcataggcagaagagatgactgggaattgtgatttcaaaggctgagtgccccaaactatttattctaataggaaggtgggaaataaaagccccactggactagacaggagggaatatgggttctcagggctgtgtcactgcataggtgaccctagctgggagttctgatctcttatttctaaaaacaaggttagaccaagtgctctctaaaatcctgcctttctaggagtctgtggttttagcagctgacctagaccatctgctattagaagcctgttctttgaggctactcatgtttgttagagcctctgctggagagaagcagaagtaagaggtacatctccactcggtgtacaggctccagtgtgcttcctacaggcagcacctgcgggcagctacaggggcctgaaccttcccctgggagatctgcccaccaggggcactctgggcctttttcaggccatgcctccatataagaaagtcgtgagacatccaagagccctcatttcctgagtccccttcagtgactttgtattgaaagtaaaaatagagacaggaaataaaacttgtttttttcagagaatgtctttgaagcttgggaacacagaatggtcgctgtgcggtctgcctccagccgacagtaagtggacactggggagttgctctagcgcttgtcaagaccagcttcgacatccaagtgaaagcagaggcggcggtgtggagaaagagcagagatttgccattgatcatccacatttcctttggttttttttttgtttgtttgtttgtttgttttttttcctaagacagagccttgctctgtcacccaggcgggagcgcaatggcgtgatcttggctcactgcaatctctgcctcccgggttgaagtgattctcctgcctcggcctcccgagtatctgggattacaggcacacgccaccacacttggctaattttttttatttttagtagagacagggtttcaccatgttatccaggatagcctcgatctcctgacctcgtgatccacccgcctcagcctcccgaagtgctgggattacaggcatgagccacctcacctggcctatcatccacattttctagatgagaggaagaatgtactacaggaaatctccccaggatctgagatttgtcctgtgtcagaggtgaagcccaagacacggctcacaccgacattccagggcagtgccaagccttcccggactccgggcagctcggaacttggggactttgcccccaccctccagcatctccagaatgaggggagtgtgtatgtgtgcatcgtgcatggcccctcctgccttcttgttccttctccctcctgtctcctttttcctcttgctccgccattctcccgcccacaatatctgctctaataagccaggcggcagtgctccaactagcccataggtggttcacgctggagtaccttgtgcaggataatttgccaaatgggttagaggtctgtcttgcaaggcctgtgcatacatccacaattagaagggagtgaaaggaggaggggaacctaacaaccaagaatggctccacatccatttgcacagtgtccaccctgtctctgcccttggcctcccaaatggatgttggtctggacgtcactggctccgctgcctgtctgtattggcatctggtacatgaagaccaagtttctgaggaaagccagctctcaaccttgaaacaaagccattaagtttctcatctgactcagatcaggcacgtttggagaaatgagggccaagttagagtttagttctagaggtggttgggggcggagggcaggttcatggtactggctccatggtcatctgaacctaagtggcctttggtgatgcgtcagaaatcacaatgaagcaaggaaacctgcaaggcatctaactgggaactatttatagtttccaaaatttagggagcacaaaataatccaataatgattttaagacagaccctccccatccatcaaggcctggctcctcccaggtgggtgatcagtgcttctggcaccagctggccctgaatggccagtggagctgcttagagcctgagccccaagtcttgtgtgttaggccccctgctcccagggtctctgtggcaatgtgctggcacctaattatttgctgaccctgagaagcatgcattgctgagatttaccagcatttatggcttactgaatatcaaatatttattagcagagtgtacagttattctattttctttcttccttgtttgaattcaaggaatcttattatttttactttaaaggctcttgatcatgcagattagttccaaaggaagggttctctactggacaccatcacctctcccatagtcttgtcattctatcagtactgaagggccaccagttcagagcagggaagtgaaggggggttatttccattcttcttacctcaaacacctgtaggtttctcagggaacaagcccagaggtacaaatgtgaacctacttttgtaattgatttttccaacataaccccaattgactgccttagttaatctttccaacagaactgcaggccctatgtcctcccgggagagtgccctccttagtggaaagggtcacgctccccactttgcacaagccttcctaggagggaagctgcgagctcttcagctgaaaagcgaaaaggcctcttctgcaggtgtacttttcaaacctgtatccttggaggttaagtgtctgctgacaaatgcacaccctggatggtctctctccccactccccacccttgccctgacaagatcacattgaactattcagggaaagtatttactgaatgcaaggagaatagagcacttctgcattatttattaggggctaacaatacccatcatatgtagatgatattgatacccatcaatgtatttggacataaattagtatgttaggaaactccagtggtccaaaaccttttaggatctctgacacgtatgtaaaaacacgtcgtagtcttacctcttatatgaggctgggaattggctatgagacaacctcacaaagaaaacaaacatctttaaccttttatttgccattagccctctgggcagttcatctactatcgagtaagacttgaaatcatgaactcttaacctctccttacacaccttctttctgctttctctaaggaaggaagaatgttcacatttcctgagtgtctactctgtgccaagtgttacagcaagccttttgatgtcctggagtgctggacattagcatccccactctataggatcaggaaactaaggctcacagtcctgcagctgataagtggctgacaaggagtaggaaacagggtcttggcttccatctgagcttcttacagtacatttgactcacccctgggcaggaaggcaaaggtcattcttggcttctgtatcagttacctgtcaccacaataatgctgcaaaacacagaaccacagcatgggtgatataaaacaataaacatctatttttgcccagaagcttgtttgttggctgggtgtgtctgctgatacaggccgtgcttggctgatctcagctggactcaagtgtgcatctttagtcagctgctggatcagctggggctgtcccgtccaagatggccttggccaggacagcccatccaagttgagtggggagttccagttctggggcagcgaggactggaagattctgacccggtgttgagttgctcttacttcacaggcttcccagaaactgtggaggctgggaaggggttttccaagatcaaatccaggatccagtgctaattgagtcaccctaaacaaacgtgtttccttctccaagagtaaaatgggaatccatacctctgccccatcttcctttcagagatgttgtgaaaagaaattcccaatgggggatccagactttggcttccactgggactcacctcactgtgccttcagttccttatgtgaaactgacaaccctggactggacaaaacactgaggttctatggctctgtgaggaggaccaagctaagggagataaaagatgttcaggtgccttgaagagctaacaccactgcacctgcggaactgggtgtcaaggtgacatgcggttccagggtaattccccaacctgtatctgcctccctgaaccaaccagatactgtcccccttaccttaccctccacaccacacacacacaaccacacacacacacacacaaccgaggtcagtctaccctctgttcgggaatgggccctcccccatctctctccttgcttcccctccccaccagcacaaaggccctggcttccaacaccccattactgctcagcatccaaatatccaaagacttttgttactagaaggaaaacgcacgatgcgtgacaagcagcctttctggccggggaagctactctgttactgaccacgcagtcggtggcaaggtccctccccaagctgagagagaagggagagcacaggacaccacggggccttttctgtcctccatgatgttctccagtctcacacaatccctcaccctgtcccgcctccctttgcatcccctctggatgggaatcatccctggcttgatgagcgttgctgcacgactctgaccacatacctttgtgctgcccatgggtaggcgatggacagggccagggccggttagtctgggtgtcagagggcagctgagctcctagaacgcccaggagcagccactctggaggcaaagtagacctggcccacatggagttgggttgggatggggaaggcatggagaaagggtcagttgtggagagacattctctctctccaggttagaggtggggaagatcagctatggggagcagcacattcttggaaaggcactttgtttgtcctgtgtctgacctcctgaggggcaaaaatccagtggccaccagggagaagcaagttggtgtctgaagatctcagagagggcttgtgcccgaggccagggcttcccttgttttaccctgggaacccagtgttttgaaaaatttatctaccaaggaacctatatttttaggcagtagctgtctgccatccttgttaatcacagattatacacagatgtgtacatgcctgccagtaccaggtcctgggccacaggacacaaccagcatgaccaatctgagtcaatattatttctttcaaaaagtggggaaaggtagccttattgtaggtaaacaaatgacttctcttcgagtctttgaaatggaagcgagcgcttggccttccatgtggtcctacataggacctgcttccctgtgagagggagggagctcaagaatgtctgagggcttttgggatctacacccacctccccatcaggcagtgacacatcagctcctggcatgccctccctgctttcctcctaaaagagagaggagaagaatcagatccaaatggtctagacagggctgggctaaccttgcaccttccgtggcagaactggctttgagcagttggagttcaggagaccctgaccagcatgtgactgtgtcaagactgaatccatcaatgccactggaacacctgctgtttcgttgggtttctatcgcatccttgggttggagggagctattgacactttcctggctgttcaaaaatgggcacatgtggactatagagtgtagtaattgaacagcaccaaagccgtttgcactctgcttgtgcctgcaggcacacctggctccacagcccgggtctgaggatgctgaggtcacagcctcacaccagctcccagacgtcattggatctgtctcctttttcttaggctttcaaggcaggtgttctccctcctgtttttattttcctttagctcctgaccaactgcttttgtcaaaatcaacagctggcaattgctagctataaaaaccctgggcaacatatggacatactgcctcattatttagggcatttgggcttgctgtacacttctagactgcaagctacagctttgcatttgttgctgtggcatctggtggcttccaaaggctgttgggaaggcataggcaggatgtattgatctgttctctctgtgcagtttgcttcacgttaagtctttaatatttttatcttaaatatgtgtgtgtatatatatatataattttaaatatatgtatctcacacaaaatataatccgacaagccaatgtggacctgtacccaaactgtctaatcaccctattaaaagcacaaatacagcattatctgaagaataatcaatattggtatgaaaattgagagctatgtggttaatccaaaggagcgtgaattgacagaggacctcagccaatgtttgcagaagatatttgcctggattttgttatcaggagattatcatgcatcactatttattcagaatcctccagatgaaggcttgacaccagttgtcccaggggtagggtcagggacggttgtccagggacctgaagtggcagtaggggcaagcatagtggtttctacatcttaaaaggggctgcagaggtttatagaagcacagattccagaaccttgccccacatggtgaaaatcagaatttctgggggtggagacccagaggctgccctgcaaagagggcccctctgatgtgcagttgggtatgggtgccattccctacaagagaagtgtttattctttctttccctgggtctgcagcaaacctgggatgcggtgtcagtgtcatcacatatactccaaggtctccatgtatttccttttaaaatgaaaatcatttttcctgatttgcctagctcagagttactggggtaatacaatgagaaggagagtatgaagtgaagaggtacctgttatctcacttaagcctctctagaattgaacatttttatttccttatttagatgaggaagacaggcacaaagaggctacgtaatttgcaaggccccaggtcttggaggtgtggaagcccaggtttgaatccagagctttccattgcataacatgctcctctgagactgtagaaatcaggcagacccttgcaactcaaaccgaggcatgtggaccagcagcatcagcatcacctgggtgctcatgagaaatgcagaatcccaggccctgtccaggctgaactgcatgagaatctgcgttttgatgagccctccaggtgattcctatgcaccttaaagtttagcagcactgctgtagaggacttcagattgagcaagagagagtagacctcaaaacaaggttcccctgcaaaggctatttctgtgtgttaccaccacacaggaatcatcagaatccaacaaaaatatgcagtcttcacaggaatgagcaaagaagaaatcattaccggtaagctgttggaaggatggcagtgagcagtcttagccctttctgtctgagttcccactgcaggggaagcgctcctcatccaagaaagccaaaaggccccaaaagaatgagttttaagatgaaaacaaattgtttttatgtggatgtgttgtgtgtgtttaattttgaagacaatatgaatacttttagaaatgagagaaggaaaaatcaggaagaaagtttagccaagctgatacagcctagcagctttcccattcaggggctctcctcttcctgccctttgagagtatcagtgcattttgattatttcaggaatgattcatttatattactttatagcacacagcatccagcagggagggcagccagttaggtagaaggaaattcagcttccaagtatctttcccgtaagtgtttgtcttcaggttaaatcctgtcttagtctgttaaggctccagtaacaaccacaacaacaaaataccgtgacttagtgcttataaacaatagaagtttatttctgacagttctggaggctgggaagtctaagattaaggtgccagcggattcagcgtcaggcgatagtctgtgtcctggttcacagagaagactttctcactgtgtcctcccgtggtagaaggggcaagaggtctctctcaggcttattttataagggcactaaccctattcctgagggctccaactttatggcccaatcacctcccaaaggccccacctcttagtaccatcaccttggatgttaggattgtaacatatgaatttttggggggacataaacattcagacaccgtagcagaccgtccacataagatgctgcctgcagaacacattgaacaggaaatgcagtgcccgaaggccaggaaacaaaatatacaagccagtgctttgagaaacataggaaagcatctgagcagcaccctgggtgccagtcttgggggaatgtcagtccactgcaaagggattctcaacctctggccagaatatccagtaggatggattctgagggcgactgccccatctgggcctctgctccttcctggcctttccccagtttttcctgttgaggccacactgtcaccacacccctaggggagctgggacttatttcaagtgattttttttttttttttttgagatggactctcaccctgtcacccaggctggagtgcaatggcatgatctcgactcactgcaacttccacctcctgggttcaagcgattctcctgcctcagcatcccgagtagctgggattacaggtgcccaccaccatgcccagctatttttttgtatctttagtaaagacagggtttcaccatgttggccaggctggtctcaaactcctgacctcatgatacacctgccttggcctcccaaagtgctgggattacaggtgtgagccactgcacctggccatttcaagtgattataacacacgttctcatgttttagcattatgatttgtaatactgtatttaacctttacaggtcacttttctgagacaccgaacctgtctgtgaagtgtacagattccctgaaagcgtcaagaagccatttgtcctcattgtcccaaacattcattgtatccatggctccaaaaagaatcagtcaggaatactacagaggcctggttgctgccttctaggaacttgtaggctaagggagaggtcgtgacacataatggccttgactgcatatgtcagcccaggcatggatactcacttctgctaaatcaaagagactctgcatatactaacatgtctacaagcctgaagtcctattgtaacattgggcttcttcccccaccctcatcccctgtcttgtactagcttccaatttcaaactagccaaatgagaattggctaaaccaatttttctagtctttctctcccttggtcttctgtttgttttgttctaatttttcaaaagtctggacgaaaggaatttgggttgggatgataccatcattctgtcacttctaaattcattctgttaacaatttttagagtcacatgggtagaagctttgattctgaaaaactatgcacttttaagttttgactccagaaggtaatttcaactcagctgtaaacaattcgagagggtgaatatgaaagaggaactgcctcaccaggcttcccccaccctggcgtctggagtcctccctgccttcgtggcacctgatttcagagataaagaatttcaaggatatgctagagcagggaggatgtaaaagggaaagacaactgcagttagctcaaaaccagactgtgtgaaacagccctgctgctttgtcctttctcccatcccccactcactcactgatgccttccatcacccggagattacagggaaggctggttattgacagctgggcagtttgcacaataaagtttaacggtttacatctctttgtacaactttgtcaatgttttccatggatcaccttctcaggtgagcccactgactcctctccttcttctctttcccttcaagcgtgcaaacgcaaagagcaagaaccaaacaaagacaggaacaattcccagaagaagtcccgcctggtgttcactgacctccaacgccgaacactcttcgccatcttcaaggagaacaaacgcccgtcaaaggagatgcagatcaccatttcccagcagctgggcctggagctcacaaccgtcagcaacttcttcatgaacgcccggcgccgcagcctggagaagtggcaagacgatctgagcacagggggctcctcgtccacctccagcacgtgtaccaaagcatgatggaaggactctcacttgggcacaagtcacctccaaatgaggacaacagataccaaaagaaaacaaaggaaaaagacaccggattcctagctggggcccttcactggtgatttgaaagcacaattctcttgcaaagaaacttatattctagctgtaatcataggccaggtgttcttcttttgtttttaatggctatggagtccaagtgcaagctgaaaaattaatctcttagaaccagacactgttctctgagcatgctaagcatcccagaaacccaaatggggccttcctggagcgagttaattccagtatggtgtcaaccaagctcgggattgcttaaaatatcatccatcccacttcaggtcctgtcagcttcttgcagtcagagttcctatgagtaacaataggagtttggcctatgtaaggactctgagtttaggcttccaagatacaacaataagagaagaatctagcaacgagaatgacctcatttgctttccacatgcttagcctcattataccatgttatgtccaagttcacagccacaacatcagaatggtaattactgagcacaagttttaaatatggacgttaaaaaaaaaaatccaaggacctgtttttccaacccagacatcttttcattgaatgatttagaaagctttaagttgatccagcttacaattttttttttctttacctcctggaaatctcatatggtcttggatccgtcaaaaaaaccagtcagttcacttgcgctcaaagtatcaagcacaacaaagataaacagaagtgaggaaggttctgggttcactacatctggattttcaagacacctattgtgaagtcattagggaattgatgagaatatggcttcaagcacattttgcagtttgctacaaattctgttgtacataatgcagacgcacactcaggaggccaatttaactgttaacagtgcatggagcgaatgcagcattttaaaagatctaggtttttttaggtcattaatgtgtccttggttgatcagtcatctggtccctcctactgtgtgttatgaccaccacgtaatccattctcgctctttctgatttggggtttttcctcatccatcccattagtagggatgttttctgtgttttctagcaagaaaaaaaaatcaatcaatcaaacctgcatacatgttactcatgactgtcatctagtcctaaatctcttctgttgttgaatcatccttgcaaaacagctgaatacatctggagaaaacacagcacaccaaagaagcagaatactgcaaaccaaagacatttatgacttgtcattttctagcctaaaaatactgtgattacttttagaaatcagaaaacctctgcaactccgaatggcattcagctcttgcatttggcgcatcatcgggctgagcggaccagctacaccaaggacattagccaagccacccagaggggtggctttgccacaccagttgtcaccttcccatagcaagtggaagagcgcccacagaactctgggagattgcaaaggtcacaatgtgcatatttaccagtgaatggccccgggtggggccacgtgggggtgttcaaagcaagccaaacgctgcaatcattctttacagacacttgagactgacttttttatgaattacttagtcgaaaccaaagaaactttttctgcacctacttctgcaacaaacaaaactgtcccattaaaatgaataaataaatccgtaaatcaatggaaatcaccaccaataagaaggaagcacgccagaaaataaacgaaaacaaaaacagggagacacactgtgttcaaacagacctcttgggacattttttggaagcagattttaaagaaagggttgagacaaagatagaaataaggaagagcctcagtggctgctgcttcatttgacaactcacacggtaatcttaaagctgaagattgtctttaatttgtgcctatgcagtttttcaaaagaacacggaacagagcaacagaaacctcaacagctacaataccaaagatgaggatttctcacaccttttgtttcagttcattatctcctcttgcctggctaaaatactaatagcgccattgaactgtataaaggtaatcaattatgtttctctgagcaacaaaaggaaagggccatttatttgattttattgtttcatttcaattttgtcttatggttttttgccccaacatggaatctctcaaaagtttccatggactccaagtttaagatgttgggatattgaacagttctctctgctcagcagagggtagggaataacattatcacttgaatgttctttgcttaacccttagacttggttccttctatgttcagagtctcatcatcaggggaaggaaagggagtgagggtcagggataggggtcttggtgatgcatcctctcccgagccacagaaccaaagagtttatagaggaatttacagcctcgttttcatgtgattgctacatcctaacagggcttcatttgggggtggggggaaacatgtaaaaataattgccagtttctacttttctattagctttttaaaaatcagctgtaaagttgcatttctaaagaaagatatatataatatataaaatacatatatagatcaacttgacattggtgataaccaaaattattgctgtccaaattcatgtcttgttttggtccagtgcttcatttgctaagtattcggttcagaatttttctcatttctcatgccattccagagttaatttgccactgtggatgatttgaagtattcagatctctatggaagtttctgggacaggtttaaagtcaagatcaagcattttagcatttaacctgttgataaatggatccatggtgtacatgagttttatttgtattcggagtcatctctattctatccctcagcctcgattaaggtggtgagtgaagtgcatccaacagactcggcccagaactgggtcctgacagtggggtgctcatcttctgtaactgttgggaaggctcggtggtccattttcaccagttaaagaatatgaggccagcccagaaatctgttctccaggagctgccctgtcccatctgggtgtgccagaccccctcagtgagcaggtccaccaaagggacttctcacaggggaagcccaactcctgttgcaatgggttgatagatttcctcagggtggtaattaccaattcgtattttgacaagcctatgtgcaaccacagctggcactggggtgggcagtggtgttgggtgggatgggggagagtgtctcaatcctgaagagaaaatataaagcaggttttggggagacttctggagtcctgcccctagagagccccattgttgttctttgtgccccctcctcattccccctatgtgggtctccctatgcaggagctgtgagagaatgtgactctccacaatttttataattcatccttcctaggagattgttcattggctcttcccttgtgtccctttgtcccttgctcatactccatgtttcctttgtcaaaggactaagaaaagagcatatttcagcagaggagtgttcccatgtgggttgatttcaacttgggtatttctaaaagagtccttgtgacatgtgtccagtggaaatggttgctcttttccagactggattgaggaatggagcctgtttgatttggttagtgattctttgacatactaatctcagcgtttgggtctccagcatcctctgaagatgtctagactagtagaggctgcctttgtgacctgacattacaacattggtcaaaccagtcctctgataatcagaagaacatgtcataattgtttaaaaaaaaaaaaaaggcaagaatttctctccaaggagctttaataaatgtctcattccagataatgtcataccagagaaaagtgcttgcttttagaaaattatttacatacatatataaatatatatgtgtatctatacagttatgtatcaaaattttaagccctgcagaatttcaatttgttagaaatctaacagaaaaaaatttctatattgaaaggtaatagaatttaacccagtgagtttactcaaggatttttaaatttaagttaataatttcagagaaaataaccatttgggtgtggttatagtttagtatccattacctcaatccaaggaaaattccaggcattcctcaaccatcaggaaaaggtacagtgtgaaggaacagttctcagccaaatttcacattcttgaggcaacagaaatcaaaacactcagagccattgagtggaaaaacaatttactttattcctttacacaaataggcttgcattgtttttgttttaatgtgattttggtactagggatataattatttcattccaggaaataataaaaaaaaacagacagagccaatacatttctttttttaaaggaaacagcaacaacaataaaaactcagcaccaatatttaaaagcttttccaaaatgtaaaagaagtgtttagcttgcaccatgcataaaggtgcaggctagttgaaccaggaagcatggcacttcctctggagaaatccagaaagagttgcttctaagctcccttttccccctgcaggctcttggcaattgtaggctttagcaaatccagaataattttcaattcaagctaaaataaaatcaacatttggaatgtaaatctgatacacacacacttttctaagtcaaacaacatatttcaaaaccaaaaataaataccttttagataatcagttattttctttgtctatactgggcacccacctactagtgccagtaaattcaagttgaacagatttttaaaatcactattatctgggtatgggggaaacttccccacttttgaaaatgttggtagaattataggaatgtctgtttgattatcattaccaaagtgtcatgacagtatgcctttgtagtgaactcggattttcaggagtttgaatagttggatattttaaaatctaagaagaaaaggcctgtttccaatgttgttgaagaataatgaactctattaaaaagtggagaaaaagataatacatgtggtcaaggttgaccacaaggcccaggcacaactaccttggcgataatcttctagattcgtaacaggttagagctgactttttgtttttgttgttgctgatgctgtgtgattcagacttctcagcctaaccaggaagagtaagtggaaatggtagatgaagaaggggtagagctggtgtatctataactttctgatatttgtctgccaaacttgatatattagtaatttttttatctttagctaagatcaagtcacccctgaaacaacaggagattctagttttaaaataaggccacaaaaatccttacggaatgaagaatggcaccccagttggttgtataagtctcataagataatgatgttgattttaaatatggatgtctcaatgcctgttttctatcaatgatttgtttgtttccaaggtcggggagggaaagaggggagggtttatctgttttagaaagtctcagaatacttataaaatacagaagtagttattaaaatatataggacctcacataggtagatacagaacttaccattgaggctgatgggctgttgtgtgaatcacacaggaccttaaatgaggctcattattctcacacaccaaaatgactctgacagcctgaagcagttattgctagagcccaagctttccttggaggttttggagttaggttgattggaagtaaccagctaataccttttctagtggagaaaaagacattgctaccagcttgttcatcccatagaagtcttccactctgctccatttttagcagcaagcatttcatgtagcataaaccttggcagataagtgtgcctaaggtttatacagtctgtccgcttggatgtatacaaatttagatacatattttaacatgtgttctcatagatgactttataacaacacacattacctataggtgtctagactgtgtacatacaagtgtgtacagacaagcttcatacgtatatactgtaatccgttacaacaaataaattttaaatcatcgtttaacatgtatgtggtacttctacagtgtacattgttttcattatttattgtaacattgaaaaccacagtgcagggaaaacaaaagtatcccagcatcttcatcctgtacacttggaattaatttcatttgggcatatccaagataaactcaactttcaagaaatcttgtatattatttaatcatctgtgttaggatgacacctatgattgatgacttcggttgaatagctttattctggatttttcataactaaagctaaatccaaagacctgaaaaaggacaaaaagaaaaaaaaaaaaagaaaaaacaaagaaaaagaagaaaaaataataaagtcaagcgcaaactgatggggagacagtgggctctggtttccaggattgagacaatggtactgcggtcttggggagactgcgttagctagtggggagtggtgatttttttcatgcttgtcacatctaaatggtctttaacatgagaaagttttagaggttataatttcctgctttgtttttatttagactatcaaatgaagttatacatgttgtcagtcaaaaaatgaagacaccctctgccccaccccacagaatgctttttatcttgtctctttgggttatgacccaacaagctaagtaccattaatgtaattaacttatttaaattagttcctagtacataaatgtataggatttgggtaattatttaatcatccttccttagtttgattctactccttgtacttatttatcaaaacctagaccaatggtgcatcagagatgcaaaattctacttggaatactcttgaagtttagtttgctttataaagcagtgaaattctgttacagacagggaagaaatacaggttacaaaaagagaatttgggatattcttccctcttaaattaacttttaaaatagtctaagtaacaatttttaaattatttaacttaagttcgcagccccacctggtaccaggcgaacttcacctcttaattattgtggccctcggagccttcatattgtaacttatttatttaacttattcagcatctgtgaaaggtgcactgtatagtttatatttttaatttaaaacaacagagagcactgcagtttgtttgctgtcagaacaacagagcaaattttgtggacaagcaatgactattcagcctgaacctgtgcattcagaaaacataagctgagaccctgcttcaccagcctggatttcggggcttctatacagaaactggaaaaataaattttaaaaaaatcgtaaacaaaaagagagaaacccttacactagctgcttccaagaatgaactctgtgtgtatgtaaagcaacaaaacaaaaaaggaaaaaaacaaaaagcagaaaaaagaaaaaaaaaatgaaaaactttctatttctagtgagaaccaaagaaggctacctcactgactttttccatttgtaattttaatcgtgttgatgacaccaaagataccaaagatttctttctctgtgcggtctgcattttgcttgtgctcttttataatttgaacgattttctctgacatatggtatgtacagccacagctcagataccccaaagaaataattatctatgcgacggcggctgctaatttggaaagggatattttctgtgtttctcttatatgtttgctgtctgctcgacatgttcaagatgcgagttcagatgctgctgtaattggattccttaaattctgattacaaattgaggaaggaaactggttggaaatggccttcagtcctagccatggcctctatccccgctgggacctgtcacagtaaagactgccaattactgaaccacagaagctctgaccattgagtagttgagctggaagagaccttaggaatcatttagtccaagccccggtggcccagaggaatgaaatagttatccaaatcaaataactcttgagagtgaaagcccacacatgcctcctggttcctgccccagtgctccgcttattgtacagtgctacctctgcatgagagcggtcccacattgacaaataggatggtggcaatcctttagcaatgagcagggactggggtttatctcttaacattttcagctgtaaaattagtcacaagcattttcagtgtcccattagtacatagtcacatatggtcggttgcttcgtgaaggtggcctgtcttgaaatactagggctcatacgggatttttgccctaggaaaaacatgttgatcccaatgatgtgatcacttttgaacctttccattacaaagcattgtatagataactttttaattcagtaggaggagaaagttcattcttggcctgttggctttgattattatgggtactttaaagtcagtatttatcaagaaagggaacttgaccaccattggcacatgtgacatttaagctcttcagccttttcctttttagttgtaggtgtttacatttcatttctaagccaactctgtatttatgagagaagtttaagccttacatcatttgatactaaagggttatttgtggtaaatgaaaaatgaccccaaaattacagaggaatatgccagtttaagaaatggctacttaaagttgcttctctctttccttcttactcatgaaattaattggtcttcttcaagtttctttagattccattaaatgattaaatcactattaagagccattcatcaacgtgatttgtgtgttagccaatgaatctgtctcagcttttgaccaaatgggttttagacaaatgcaaagatctgcctctagtccatatggctctttttgagtgctagtattttgcatttcacataatgtagttattttgagcttttaaagagagcatttagacaaagaagcaaagagaggaagggaccaatcaactcatcagttccatgcatcaacaaagcatagctagtagaggaatataaatgacagattgacaaactgtaggaaacactgttactctctttctgaagttttcaagcaccatcctatgtgaaagttccctcctgtccaaacaagctcaaggcccatcttctccctatacaaggcaaacctgtaaggccttccttccaaagagtacattgctttggttttcttcctaaattcctattggaattagaactctcagaatccctgggagacagagcaaagatgacttaattcattgagcagcagagctccctataagtgaacatcaccttccccatctttcctactgccacacccatacgagagaggatctagaaagagcgatggcagcctgaacacagaaaacatccccacttggcagacctctcctcagcaatccccccagcctcatgcttcacttgcaaagtgtgacataaccacgggacgagtgccttgcttgaaccaaagcaacgatttagccagtctggacctctctgtgctttttttaattcttcctgtgaatacctcagcttcaactgggcctccatacagtcagttggtgggcttattgtactgtggtgctttgcaatgcaaccctgcaaagaacaagatttgtactaataccaaaggttctttctctatgtctcctcctctgcctccctcgttcttcccttttttctagttcttcacggttccaaagctttactatgaacctgggcatgttggcaatgcagaccgcgcaattccttaccgaattttctcagatatacctcatagacaatagtgtttagagtaatgttattatagcgtatgtaataaattattcactgtttcttttggtaactgtgatttaaaaaaagaaaaaagaaaaaaaagctttatacgttttaggttgtgcttttgtaatagatgaaaaaaggtgcgcttaaaaagaaaatgtatgtttttttccccctttggattttatttatgctggattggggaaagttgcagaatgagcccaaagtttacagtttcatattttgctgaagaaacaatctgtgttcatttgctctgttgaaaagaataattattttctacatttgtgccacttggtctgaacaattaattgttccgtgttaacagtgtagtattatgattagcaactgccaatcagtgctataattttatgcatgaggctaaaaatttagcagtgtgatgcattgtggtcttaatagcaacatttttcattttgaactagatcttcccctttggttcaatggactttatttatgcatgggcgcctattgtttgttagcagttgtggaacagttgtgtatacattaaactgtgaaaatgtacacagttcagcctcagacggtggtaatattggttttattgggagatgtgtcacctcgaaaataccctttacatctgttgggatctgaaaatgagtcacattgaattgggttccagctttataatgagaaacgttattcctaatttttgagttagccaatttgcattccacaaattgggatcctcataacccaaatatatcaccgtatgtgagagggatttgaaagcgagtattgaaaaactcacctttgcatatttaatttccaccaaaaggagttattttggctttatgctcatgaacttagacctaactggccatgtatatgtagatgcaaattcatctagctgtggccctctttgatctctgcttgggaatggctatttttgactatgcgtggtttcttctcgtattttgtgatcaggtcagctcccagtagaaactcaaatggcatcaatattactaactcttctctgcccacttctcttttgtccactctcctagacattcccaccaactgttccagtgatttgggcaaaaatacgcagccatttcccaaaacttcacatgtgcagctatcatggctgtccctccctagacttggaggtgactctcacttaatttttacctgcccaacaatgttccatctaccatctaaaaggtaatataagaagaagttttgaaacccactttaggaaaaccatcttctttaaatccttcaattatctgaggcctctatatgtcaaaactatttttcagttgcaggggattgggcaaacttgttctttcttatacttgggttcaaagacccattctccagtttcatatttcccaaaccaaaatgcttgacataaagccaaatcaactgccaagcacactttattttgcataggagtatgcagcctagggaaccttggttgaaaagcagcagtctgctatgcaaaatattggaaatcactgacagtgtagcattcatattatctgtcaatgagggtatattgggaacgtgctctcgtgaataataaaaagcaacatatttttatttggccttataaattaggttgtggtaatgtaaactttgatatatagtctttttatttttctcttattaatctgccaaagatgggaacagatacaagaatttttcaaattggcttttgtaagacaattgatgattgtaatagtgtttaatcttccagaaagctttatatgttgttccacaataaaattgatatttgtttcagcaaagttttcctgacactcacaaacccacaaactgttcctcttaatgcagatattgtagaatctacaaagttcaaatccatttttgatccaaagaaagtagaggagtatttgagacatgagtgtacccagccctttttttaatcacaggcaatgcatgggtctggctggttacactttgccaagaagacttgtcttatgaaacccaaggtatattttgttatgccattttatgtccttttcttttaacattgtggaaagtggtatgttgaatcaagtgtaagctgagttttccagacaactgaagtagctacatcatgaatgttattttgttattaaagggtttttactcagtgctttgtgccaatggatgtccttttccttggagacacataactacaaaattacctcagcttggcctggttttctctcctgccctcttggggaaacatgggcctggcctgggaaaaggcaggtcatgggctggaaggtaggttttggtactaggaagaaatctctgtatctgtcagctttaaagagaactgggccaaaaatctctaacctcactctctctggactccaacacttccctgcaatcctttggtcttgagcatgtgccagcatgaaggcagactccagttcatacatgaaaggcaagaaaaagaaaatagtaaccttgaatcttctgtgggccaccaggcactcacctttccccaccttgcacactatccagtcaaggctattgcagcccatctggtggctttacatgggacattaccaaaggcttcttcctccatcctggggttgcaaaggatccaggtcccctccatccagtggggctcttccacatcagaagtccccctcccaccatcctctgcatcctgtttagctatcccatctataccttttggagatgattatttagaaaacaaagaaaggtatggaatggggtttcctattgtttgctaggttatattttagcaattctcaattctttgatctggaaaaatacaagagggaaaaggagaccccactatctccctgtgctttgctcccatctcagggggcaggggcagtgcacattgcctatgctgttgatctgtcttgggcgacaggctgaatcacagctattgccccagccaaaaacatggcccatcaatgcctactttatctctgcttgaaaatcctattcaaaaagttgtagagtttgaggtttttatccccccatatcctttgctttggtccagtttggcctttagcataagagtcagctttatctctaggaaagttttttcagattatgacaaggaacctgccacctgggaagaaaagagtccgaagactagcaatcggataggtagtcataccattaacagatacttccttgaaggtagaatattatttcctttctttacagttttgtgttacacaagtccaagtggtgccagcaaacttcttaccgtgaaatgttgtaaaacacctggcatactgaaatttctgaaacaaaaacacaagctccacattgataacttgataaataaccactaaagtttagatgcagggactgagatgatacaggcaaaatcttggtgttggtttctcttttaattcgtatcttcgatcacctaacctttctcaatccaagagcagttcagtcttttctccccaagtctaggatgccaaagagcatcataggaaaagataattagggattgaccagcatttcaattagttctcttcttcatctttgcatttctcaaaagtgttctcctggaccagagggaaagagctggtccattttttttcattctttctattcaaatttttccacccagacaatactttattaacacagatactgtagatccttccttggtcagtgaattattacaagaggagctatccttccaccaaagtgagtgaaaacaagttccagtatcttttcttccatccagttttgttctcagaatccaagtcagtcctgggtcttttctcactttagaccctggcctcagatgtgtttattcttgctatttaaaaatacctttaaatttcacatgctggcctgcagaacttgcatcctttgttctatactgttgactgcttgatggtattgaaaggtgactataatgagggaagaaaggaggaggtaaagagagaagaatttgtcccagatctgtttaaagtttcaaaatttaaaaagggacccattaaattatgggaaaatggctatagagtgtgagcctccgttgaccatatgctcaaagaccgtactctgccacctgccttccaggtagctattctagaaactcagtcctttgtggaaacccaactaccttttaaaagtctctttccagattccaaaaggacaagagatcagagagtcacatatacgcctcttgttttattttcttgctttcacgggtattattgccaagaaaatcgtagggaaaaactttaaacttttcttttcagttgatccctttgacatcacctctcatgtttaaaatcaggaaaacacacccctaaaatttgcactctcttccgttttgaaaaagaaaacccacacacaaatgcacactattaccgtctttcaccctgcgctatatttccaaagtgtattataatccagatattgccccatctcaaacatgttaagtcagactgtgctgaaagactttccagggacggtcaacagggtatatgttcagtggctgccctgaaatcctggtggggatgaggatcacgcttcatcatcaaggggatgcccatcccctgataagctcccagtccttttggaagatttctttgaatgttaattgcattttcagttttgctcatttcccaccccaatgttttgtctgcaacatcgcttacactggattctttctatttttattcctatcattaaatggtagtgctgtaaattctgcaattaatgttaaataaactgctttaattcattgaccatggctcagttgccttctttttcttttcatggaaggaattaagcactcttccccctacagcaccccattgtggtttcataaaaaaacagtaaatttgttcttagtgagactacaatttctatctctgacagtatgcaagacacatcttataatcaacaaacctgttatccttgttataaatcacaaaagatgagagatgctccataaaaactaccttttttcttaacctgttaacactttagagatagcctgtcctagacttatctttgcacagattttgtatgaggtcacatatggtgagtcaaaagaaggatcatgttattgtcaccctatggaagaatcaagaaaaatagaccaaaaaaaataaggcctcatatgaaatctaaaccctgcaacaaattagttgtatggctttgagcaagtcatttaaatcatctgggcttcagtttctccacctgtacaaggtcaaggttaaacctggttttatcaaaagtcccttccatctttgcatttgccccagatttttgaaaatactaacatttttatacagattttatcttggcttattattttctctaagttaatgagctaatgagtttgtttattcgttttattttattttattattttattttattttctgagatggagtctcactctgtcacccaggctggagtgcagtggcacaatggctcactacaacctctgcctcctgggttcaagcaatcctcccaccacctccgtctccaagtagctagaattacaggcatgcacccagcttaattttttttttttttaattttagtacaaacggagtttcaccatgttggccaggctggtctctaactcctgacctcaagtgatctgcccacctcggcctcctaaagtgctgggattacaggcatgagccacctcacccagcccatctattcattttaaatttagatatctgagattggagactattattctaagtgatgtacctcaggaatggaaaaccaaatatcgtatgttctcactgataggtgggagctaagctacgaggatgcaaaggcataagaatgatacaatagactttggggacttggggggaagagtgggaggggggcaagggataaaagactacgaatatggtgcagtgtatgctcctcaggtgatgggtgcaccaaaatctcccaaatcaccactaaagaacttactcatgtaaccaaataccacctgtaccccaataacttatgggaaaaaaatttagatatccacaagcttcaaaggagtcccattgggttaacccttggtctaactcacctatagcccaggccatgaagcactgattgccttcatctagactggtggttttcaaccctgggtgcacatgagaatcacccagagagcttttaaaatatactgtacctaaagtccatcccagaccaattcatccaattccacaagtgtgggcctcaaacattggtgtagccattagcttttgctagagttagtt

SEQ ID NO: 420 - DNA, 1120528 bp, Homo sapiens
  source 1..1120528: mol_type = genomic DNA
aatgggaaaataatatgtgaatggatagttgagtagttagccgatgggagaataaattggttcatggatgatggatggagctgagtggctaaatggaatgagagactgacagcagatggatgggtaaatgtggtatgaacaggagcaagaaagggtcaggtgcacataggaagaggatgatgaaaaggaaggaaaaaaaggcaacaagaaagggagtactaaaggtactgagatggctaggggaactggaatttcattcccttgatgaatcataattttacaatgagccagaggaaattggaaactcccaattattgatgcctagtgtttacttgccattgcaatttacaaagaacatgtgtctagtctatcaacttatctgtgttccattccctgtaggggagactgagtcatgaaaggattagactttgtctacgtaggaagccaacaagaatataagactcacaactttagctcagggactttgccagagaagctacatgtgctgtaaaattaatgaaataattttacactttctattcagttatcaaatcataattagtcactgtccctaagctttatttgaggacagccttaagaaatctcatagttgcaaaataaaccaaatagcagccaaataattctgaaccagtgtacactaggtggtgtaattaaattcaccagtgatacagatgagagaacaaaggctaagaaagtcacttaccagtctaagatctcacacctagttaacggcagaactgggaaggcttaattgatatacaaatggctaatgagaaactgaggtgtaaaaagaagttagtatccatttctttagaaaagcagatggatgtgtgatggagaaaggggagctggggtttcactggaagagaaaggtgttttagaaatggcaatcagaggaaaggagccgctcctctggggttctttctcatactattccacaagaagcctcagctgaatgaaacccaacccaagtaaaacctaagatgcataaaccttcatctaatggcacacacttttaagaatcaatgtacatcctcgaccccatgtcttctcatacttacccttgttaacgtggtgtgtacttcaagaaatcaagcaacaggaacttagggactcaaatgcccaaactgggcagtatctggtcacccctatttttctgacacttctcttctgctttcgttttcgcctacaccaacaaacaatttagactttgaggctgcagctacattttatattgtttgtaaacagcatagatctttgatatacaaatgtcatacggacagtgctaaggctgctttctacagtgtgtgcgagagagagaaggagggagagagagaggtggggggtgcagctccaggctttctgagtgcatctactctccagggccaaaaacgcacatatgggagaagcagagctcgcttcatatttttcccgtcctggatatcaatgagatgtcctaataaacagccccccaaaagttacaaatttctcgaactttattggtacactgcacaatcacaaccatctcgtattcatcctgaattagaaaaggttacaactacaatgtaacatgcacaaaattcaggtagtatattcacccttgatacaattattgacagaaatcaagtcttcattgattttttgaaggaaaaaatacgaaagaaaataaaagaaaaaaagaactctagaaggctgacaaagtcatactcttgtatcgtgtgataaatttttaaagcatttgaacatagattttttttgaaggataattgtgagaatgggcacacccattgtctgacacagctataacggcaccattgataagtcataatttttttttaaatctaaaggactctgaacttgacagacacattttcgttcacccacacagtcctcacaactgcacttgacatgtcacgaaaatttccgaacgattaaaaatgctccctttaactaacacaagggcagcttgcagtacatagcattgttattactgatagctttataaatctgccaaataacatagaatgtagcctcaaaaggatggtcgagggttcgcaatctttctttctccacccagtggtgtggagcaactctgtgccttaaagagggcaccatggaaagaaacaaaaaggaatctctttcaaaatgctggaaattaggcttagctcactactttcaggataaagacaactgcatctaattaagtccactccacatttctttggactctaagtattctgcacctgaaggctaaattgaactggctcagccctatcttttttgccacatctttaattacaaatctatttcttcttcctttcatttacttctcttctcttaagtaagaaatgtgggaaatgagactggcagttttgtttgtttgcatgtggtgatcattaggcgttctcatcatatggtctctttttgaaaatgttgccttcctacttacacacctgtgaagttttactcaagtgctcaaacttatttgtcttcaagtaaaaagacagggaagctctgaataataggaggggaggcaattgggtataagagtttccaagataaggtcacgtgcaaaatgaaaacaaaagattcttgctgttggagaaaaagaaaataaatgcattttttccaaaaagaaaaaccttatgctgcttcccttaattccaaagggattgacaatttgcttttgtgtgtgtgttggtctgtttcattttggactggttttaggtaatgcatagccagtttttctttctcaagatcaaagtcagtatggaattgaggaaagatgccccaccaccagatcttacctcatcttaagccattcctcccctcctaccatgggctggcgacagccaaccagcacttgaaaattcaatgtacagccactcctgatgccgccacagggataagctctcgtcggggttgcctgcccactttggggttctctgcttttctcatggaatagttctttcagcataaatagaacttgctgacttctctttgttgaaggcaaattgactgaattgatgcagaaaaagattctgaaacccagcctcagttttgaagttgctagagtccaggaatagtcttctcacccaggttttgagaacaaactgcccaatctgtaaatgtatcatctagtaagaggcatggatgtaagaagaaagagactggggcctctttgtgacacaacaccttaccttttcttctgtttcgtggagcacagttgcagcagaacagccatgcgcagtgctctgcataaagcctgtacatgttttcacaaccacttctctacatctccccctccctgaattaaagcaagaatgagaaaaactaaacatgcttgtttagacttgcagtcgactgtatcaggcacttgacattaaactactgaaaaacaagcttggctgcagccttaacacgagcactttcattggcattactttggtggaagtgcatatgaactctgttttgggaaggggaagggtttcagagtccctacattgctaattcctctcacctaatctcctaacaggacttatttggcttccttttcatgtggaaaacctgcaagagatgtacttgctcagacttgtatgttttgtcctgccttgcccccaccccatgcccactactggcaccctgaacaaatctagcctgtaggcattctccatgtactctccgtgtgtgaagttggaaaagtgtggatattgtcttgtgtaagcatttgttgttctatatgcttcaaaatgatgggtgacagccactctcccatgaagccatccccaccaaagaaacacaaaaacacagaagcagaaatatgtctgttgtgaagaagtcattttcactcccagtgagtaccccagttgccttgggttgtatttactttgttgtctttaccccagacagatgaggatcaactgtagcatttctctccctctgaaacgtggctgggataggtacccaccagaggggcatcttagtatcctttggaagggggaacagcagggttccatagtggccctgaagccagccttgttgggttgagaggttctgatgatcttggccaaaggagcatggaccctttcctgtagaacaagtcttggagtgaggaataggtccagcttgtccatttcaagcactgtgttctccaagactgtccactcttcacagccttcacatttattcaactccaaagtaacaaatttatcatcagtagcatgctcagatgacacatttaattctcatacactatctgacaccaactcaactccagatgctgaaggtggtgacagatctgaaacgtctatgtgcgacctttaattctgattttgcgcctgctcatgatcatccctggaactgggaatcaatgcaccattcctggcacatcagttacggttcccgaatctggctcctggcagctcactaggaaatgcagatgtctgtttacagctggaaaatgtaacattaatttcactcacaccagctctacctcttaagacagtgcttagcatttagtgtgccaagatagcctatgtttgtatgtatgtatatatgtatagatatctctgtgtgtgtttccccatggcagaggtcacactcatgtgccttgatggacaaaaacaaagaggacactgataccagaggaagaagaccagttaagcattaagggcacagaattcaatggtgctcatattttttattttttagactgagggcctgaaaaggttttccaactgaggcagggcaggtctgcgattgatgctgcattctcatcctctctgtggatcagtccctgcagcacacctgtgcggtctgcaatgcctttattttgaatcccaggcaactttgctggatgagtccttctcgtcccaggagacaagacagcaaaggtggctcagctcttgtttgtatgctgggtctgctttgaacctgaagagctggtgaagttcttccccaaagccattggagaagcagctgcatcagaggaaactgtgtcactgacactttctcccttctgtttgcagtgttgtgttaatcaagtgcttgaaaattaagtcagttgctcaagtgccctcagcttagaagagcttcctgaaacaaataccagagttgtcaatacacccgccatgtaattggcctccatcagctttttactggatagttttcaaacagattaaaccagaactggagcagaaaggagactctagctgaagtcatcccactcaggcgggtggactcttcactttgcattgcagagacagatgtgtttttctctcaagttcttgctgctaaggaaagccagccataggttcctgacatgtactttcttgaagggttgagagaagcataaaggctggcacctttgtccttcaagtgcaaaaggaaaaccacagtgctaatcaaaacttttctaggctgatctgcttcccaagaaagtgttttagaaaacacaggctcttctgggaatagtgagtgactgatcattagcttgctactttggcctatctgttagtgtctcccttgggtggataggataccagattttaaagagtccacaacacagggtattgcttttgtattttgttaacctgtgagatcgttggctttcacagaagttgaaagataattttgaagatgccaatgtctgctgatggtgtataaatgaatacagtgggagagatacaatatggttagagattcatatggggatgaattgatagtgagtagtagggagagaatagaaaggagtgttagacaattacattgatagattgataaacagtaaatagattgctagagaggaagacaggtgggtagataattggatggtgagataaatcagatatttgagtagatgggtaactgtaccattactttgatagatagcttgacaaaacctaaataaatcagccacctatcaatcacgtttatgagttgaacttctctttttaaaatagaggttctatcttcaaaatgcctcccccttttttggttacttgacttgcaaaatttagtgttgggtttcatgcatagccccaaacttcaaatctctgcagatggtggaaggaatgagtagagcggaggggctacagaagatggcacaatcatctatattgaaatctatagatatggatatagtaggatagtgtcccagaaagaaaagacgtgaaccctaatggaattagataataattaacatggatgggggcatatgtacattgtcattaagaaaataatcacagataataggacacttggatgtagctcttgctgtgcactatgttataagtcaagttgtgtcttcagggtgtttattgtgaggctcaatttttgcccaaatgaaacttacgttttgttgtgtgtggcagaggatgttgttgggaatgatgatgaggagagaagcagaggaaagggaagggtcaaggtagcaggagcagaccccatttttggacacaccaatgaatgattatcctacacgtggtagaaccctgcccaccccgcccccaaccccactcattcaagctggaaataaaagcaaacaaacaaataaacaaaaacaaaaagaaaacaaatctagaataacagaaaaaaacaaaaagaagcccaagctggtttgctctccgcagtgtagattaaagtctgtgatatggagaagcaggcgttgctcagaggacctaggatttcttatcaaaacttgatgaagaagtgggctaagagggtccctgatagccagagacaagccagtgctctggaggccgagtttacaccatcaatgactgctccaggccctgtgtaggggagagagagacagacccattagcatacacccaaggacaccatagttcttccctgacaagcaaatacacatacatgcttcccaccttccacccttccgctgaccattccaagtctaaacaaaggaaaaagcccattgggagtatttaggaactcaaaggggcaagctgttgggatgccttgaccaatgcagcctgctctgaaagactatgcttaaaaagtaaataggtgaagctcaggctagtcattgaggcccgtgggcccaaaggttaaggcaacacatggaaaggcagacctgctggctgttttctaatcagtgcctctaactgtgtgctatacttggagagtgtccagtacagacaatgatgagtcggggggcacaaggccagagaggcaaggagcagatggtggggtaggaaggggagacggatggagacataagtccaagtgttgatgtagcagacttgtcaacctcaatgcatgcaacctaggtgttgtggaggctcctcctgcagcagctaaggaaggaggaacaatcatccccatgggttttaaaggctggaattaggcttgtcccagcagtcagtgctgcctccctaaaggccttgaagcagatcaacatgcccaaaacagactgcccctgaagattccacccaaggggctctcccttgatttttttctagcttctctctctctctctctctggccccttcctgtatccccaataaatcattcaaggtccaccgggaaataagtccacagtatcatgagtgctgttcttttcccctcaccttccatggctcaagaagacaaatcacatgaattggtattatcctagcctgcttcaagggcaggtgtatctaacttggaccaggtgttcctccatcacctttatcagcaagcacatagggtggtacgcaagactaggagccagcagcaagtgtatcccagaaaaagcaaaatctattattaccaagggattaaaagccattacgaggcatttctataaaactagtgaagaagcaaaggagattcaaaggagacagtacacctcttctaccatctcaagccaggacttcacagcttctttgagaagcaaattggcctactggaaataagctgaggtgcagcagaacctctttagacaggactagttcatttggcttgcctgtcaaccttatggtgaggattcatgccttgcccaggagggactgatgggaacattttactttgggaaagtcacgtctctcacttcagcaatgagtatacaactgttcctctccactaatcttaacatgaataccttttctttctacttaaaatatacatgcttttatggactaaaagtcatatttacttgatagcttgaagtctgactcatattagcctgcatttttgtcagagaatattcacaaaaaagggcggaatccaggttgtagcgacatgttaatgtcccagaggaggctccatagatattgatggaaagtagcctgactgtggggcctccagcagtcctggcacacatcctgagaaatcatactggcctgcagaatgcactgagctagaaatgctcaggttgaagctcaaggtaattctctacatattgtctttgaaagatgagtgatttaggtttttaaataagtttatttacatttttaaataaaaatatgtacataaagctacttttaaagaaacatatgggcagattcataaggcccatatgtttctttaaaattatctttttgtatatatttttcttaaaaagtattttcatgacatatatggcatatatactagactagttttgtatgtgtatatgtatatacgtatatatatatgtctttgtctaattattattttgagcttaagaaacaattgaagccctgatatgctccactctagacagaactcttgagtataggagtcattctatcccaagttctaccagtgaactgaaacattcctgtggataccatgccatcggcccaaggttgaatatagctaaagcaaagaggagtggggcaatatacacagaaaacagaccatggaagagtggggctcagagagagaaggaggcagaatagtaaaaggaaatgagtgtttctggtggtgagcagcagttgccatcggatgcttggtgcttactgggtggaggtttacagtcatattcagcttctgttgagcattctcaagagtggaaatgaaagggagacttagcaggtatgtaggctgctcagcctgcttagggcaatgatgacaacacacgttcacaccgtgctctccacgtggcaagcacgattctaaatgctaaacatataatcagtcatttaatcatcacatcaaccctatgagctatgtgctactgtcattcccactttgtaaacaggaaaactgggaacagagcagttagacatcttagctatggccacgcaacttatgcaccttgagctggattagaaccaagtcactgtcctcagaatctatgcccttaattgttacaagtctacttcctctctgtagaaaatgaccatttgtgcaggttttccagggaccacagtatcatggtgtgagagaaacaatggactgggaatgcagtgtctctgtatgaatgtgctgcaccctagctgagtgacgttccctctccgggctttgcttctcgcattgcaaattgagaagagatggggtttgatgacctgtgaggtccttcttctattagctctctgagttattacatgaatggaaattctgcatccaggtgttaggagagatagttggtgagtagccagacagccttcttcagttgaaagaaaaccgtcaacacgtgccttttgcacttcagaattccatctcccctgagacagcaagagggcaccgaacactctagtccctaaagtttcccttttgcagccccattttctatgtggcttcagggagttttattcttcagcagctatgatgagcacctgctttgtcgtatcaaatgccatagcaatttactgccaaagtgcctttggtcaattggtgtatgagaaatggctgggctattgtggccagagaatgaatttaatccactacgatacacagtgaagctagcatcactttcctcatacagatcctgggcacatttgagacttgtcagctgggccaaatgccaatgcggtgagggctctgccggagggctctccagctgtgtttggagctggtacatctatgtacactctctagacttgaagagtgtgagacaaaagccatgggcaatgaactcattctttaattgcatctttgcagtagccctgtgtaactggaaatgaggaaaagaaagtttctgggttagttctctcccactaggctgctgtatgctacagttgctcacctaacttggccaaatgcttttctgctttaatataaaagtgatgggttgctgcaatttaagtaatttggtgtggtcccatggcctcggggctcacgtttggtcccatgggttaccatgaggcttttgtaaatgttagctcaacaaagctacagagccacctgtgtgacaggggaggacatggttttgaaggaactattcaggctgagctcagcagtggtagcactgaagcttgcatacatggcttcagagtcagattgagtacagttttcttagagcatggcctcggctggtaacagctgcatggacttctccaggtacttggtacccaagatgatacaattttgaatttcaatatatagggtcagaaacccagatgtttgtatttattcatttattggtaaaaattggaagaaaggtgattcttctctaaaacctagaatactagaggcagttttttttttttttagatggagtctcgctctgtcgcccaggctggagtgcagtggcgtgatctcggctcactgcaagctccacctcctgggttcacgccgttctcctgcctcatcctcccaagtagctgggactacagacgcctgccaccatgcccagctaattttttgtatttttagtagagacggggtttcaccacgttagccaggatgttctcgaactcctgacctcgtgatctgcccacctcagcctcccaaagtgtggggattacaggtgtaagccaccatgcccggctgagaggcagatttttaatgacatattctattccagaaaactgatgctaaaatgcacccggataaaagcccacgggtttggaagaaaggcgaaggagcagacttcctggaagcataactgagaaaacatccctagggacctcaggaaatgctctctacgctcccccggggtaaggtcgctgaccgcaatctggcaatgttggagttggacccatttggatttaaattctgaccctgtgggttgccagctctgtgatcttaggcaagatacttcctgttttctcactgaaaacaggcatgatgatgctgagtttgcaggactgattgaaggatgaacgtaatcagtagagtgcctggtacaaagtagtcatgtgatcatggcaactgctgttggaacaggacctgcacacctccctgtccctttcttagtggagactaatactagcttgtttagatagttccaaaatatgttgaacctggggtgaggtattggtaagggagtgagtaaagaggtgagatagcttaagattgcagctgagagagaccactggctgtgagggctctggaggatgtggggcattgagcagggcactgggagccagccacagccaagcttcctggctaggtcaaagggtaatgtgtccatcctgcaatggagacgggccccaagccaaccttgggaaatgttgaagtcgttcattcaacatatgtgaattgatccctgccatgcactaggctctgctttcacaaagaaagacagaaacagtccataccttcaaaaagcacaaacttcaggaggagctagcttatcctctgtccttgattaaataaataaacaaataaacagacaaatattttttttaaaccatcagagattctgggaagaaagccatttggaacaaataaccctaaatccctttcatctcaggaacatcctgcctgttggatagtcttaagagcattgattttaagagtcagaactgaatttgaattctggctctgctatccaatagcaggaagactttggacaagaccgccgactactctgaaacagtttattttatgtataaaatgtggaaggagtagttctatctacccttgcaggattgctctgagaatgagttaagatggtgtgtgcaatcatcaagtacagagtaaaggatgatgaaatattaggtgagttggaactaaggcaagaattgctaatccataaaacagcatcttgtgtgggggttctgcttttaaagaaagaggtgttctagaatactaggttctcaaaggttactctccaacaccagctgaaagcaagcttggctctggctggtaattgggtgaccttctcccttctggaaaggcctgaagtggctgctaaccacaggtaaaatcttcctaatgaatggcagctattctgaggaagcgtattcagtagcccagtactttctgtgggcaaatgccacatttaaggactctttctctatttatggttagcaataattcaattgaactagaatggctgctacaaatatcaggcttaattaaatattttcagggataaatggaaagtgagaacatgtaattatgccctttaccattattccagcacctcctccttcaccctttttaatgttaaaaattaatggcttcttcatgcctgaagttaagcatctttaaaaatataagctgaaatgaagatgcaaagccacaaaataaactgagtgacaacacagtgacaacaacaaaatactttggggacaggtatacagacaaataagatttcctttagaatatagaaagaatagttagagaccagatatggttaagagacaagtttcagaaatgacaaagggatccatttgtgtggacattatggccagagcaggtccatgcagctacaagggaagctcagcaggggtaagacacatagcaacaacaacaacaaaaatgaacaaataaaaattctacttttgagaggctacgtgtcttggtaaattgctaggtttgtgcaaaagtcatcatggtttttgccattactttttttttagagaccgagtctcactctgtcacccaggctggagcgcagtggcacgatctcggctgaatctgcctttcaggttcaagtgattctcctgcctcagcctcccaagtagcagggattatgggcatgcaccaccatgtctggctaatttttgtatttttgtagagatggggtttcaccatgttgccaaggctggtcttgaactgctagcctcaagtgacccactcgcctcggcctcccaaaatgctggaattacaggcatgagccaccacgcctggcctaaacattagattttttagaagaaaatttggttgaaggcttaaaacagaataaagccacacctaccacataagaacggggaatttcaagcctggccatcctggcactaagcttttgctgctgcattcaggggtggctcaccaccctcttgagtggcaggtgttgacaatcacagtacccaaactcagcacagagctctcagaaaaaaatatagaagcttcctgctgagatcctgcctcatgagagattttgaggcttaaaaatgtagtgtatataacaagccatgaaggtattggaatgtgtcactggttttcctttccatgattacaatgaaaatatgacatcgatctccagcaaccataaactatatagctgaaattctactaaaatggcagatggtagggtgaccacactaaaaaagaaaagaaaaaaaaagcccctaggcaagttgagcttgttgacagcacagtgagattaatgaaatatctgaagtctaagaagatacggttttgttctgaaatctggataggttttgtaagtatgattatgaactgtgtgaccttcctaatgaggaaccaagaggataatgatgttcttggtgattaaaagaggagcaaagaaatctaattagatgatgtatgtgttacacttgttggtgaaacataaagctatttttagaggtgctggctgatgaaggcacatcacttcccttcaaagggaacttttcctccattgagtttaattacagcggcaaacgtggcgctgtgttgtttcacaagtaagatcaaccaacgaggctctgcagcacaactgaaaccagtcgataaagaggcaaccatctttcttctgttctccttaacacaccctgttttgtgcttactacaaaaacaaaagcttaagaagttaatatcagaagttaattcaaatccgtcagctcatcacaaacctggaagagacaagacttgagtctttgttgaaccataagctctgtgtctgtgctgacatcagcacaccctgaacgctcaatgttaaattctaaatgctcaggctaatagccagatgtcaatgattcagagcgaggagggcggggtacgagcaaaccacaaggaacctcatcaagaatgaaatgggaaatgtctgcagtttttttctactatgttgacattttgcaggttgggggaaaatacaaatgattacgctgctgtcatcagccaaaagcaatggtgtttctctctgactcattcccttcccacctggatttaaattgtggagttgaaaaataaaaatcatacacgttatcagcaggaaatggacaaatatgtgcagcttttgatgtctctgcaagaagatatcatgtgatgaacgtcttcctaaacagagaattggaatatgtggtatagcctccttcaaaagggagatctgggatgggggtccctaaattttaaattagatttggaacatacaggaggccagaacgcaagggaaagtcagaaaaatagtcatttggcttccctgaggggaggggactacaagtcctcttgggtatttggcttttctttggttagtgaaaggtatgaaactgtatagaggctataactgatgccctcattggctggaagatatatttattaattcaacaaacagttactgggcaacgctcactggaagatatagtgttacatcttctaagtgcagaaaatgacacaaacaaaatataagcataggggtaatctaccatgagagcccaaaagatgagggattgattcttcagcggagctcacaaatgctttacatatggggcatcattgagcagagtccagaaagtatgcactcatcaggcagagaagagggcacaagcctgcctctgagaccctccagcacactgggagacacagtatatgggtttgaaagaaacaggggattaagatcagacagacctaggtacaaaacctgctgctgtcccttgccccttccatccatggtggaatccctcctacctgggggaattcagtaacatcatttgttctttgagctctaggctcttcttctgtccaatgaaaaatgataacaatatcaatctcaaagtgttcttatgtgtctaaagccatgtgtggctgacactcgatagctggcagcttcttcattcctcaagcatggcacttcctatattttattgtaactgtctatttacttgtttgtgcaagatcagaaattctgtttctcctggtactttagtccttagtataattcctggcatacagtaggcactaaacaaatatttgttgactagatgaatggatggagggatggatggatggatggatggatggatggatggatggatggagagtggcaacagcatgatgtgtaacgggatctgggacacagggggcccagcctggtggatgcagggaaggttgcaggtggagtgctggggacacttgaagctataaggctacgctgatctcacagcgagaacagccttaatgccaagctgttctgggaggcagaagttttcagcaatcgaaatgacaaggttcattctgagttttggaaatgtcacttggccctgctgtggcaaaccgacaggagttggattgccgaagaaagatgagggaaccagtgagaggatatcacaattgtccatgtgagacgtgtgccacaatgtgagtgataatggagatggagaagtcagaggaaaggccatttggtgggacttgatggctaacagatgtgaggagtgagggagaggaggaagtcaaaaatgaccagagattctagagagtgtgcaggggaagagcgaggcatgccccgagcgttcccagcggagaagggctgcctttgagacccctgcggaatattcagggagagagagtggcttgtagctcagaattcaggagagaactaaagacacaaattcaggaattatcaggctgttgttcagaggccatcaatcttcagtgtgcataggattccctgggagagcttcttaaaaagtacattctcaggaccttccctagagatttcgattaaatgattctggggcaaggctcacatatctgcatttttaaagcatccggaataaggctaatgcaggccaacaaatacctcaccactgggtgcctgaaggtacagaagagcccttcccctctcaccataggctgacccccgggaagactgatagggcaggtgccggaggagctagaagcagactgaggaaggtaaggagacagtcaccacccggttatatcacataagccagaagtggggcattgtggggtgagaggggctctggcactgagacgaggtcgggtgttagagggagacagatcgtggtagctgaggcataagtaggtttgagaaaggcagatacaatgcgaattctccctcccagaggcctgtggctggagggaagaaaaggcacgggtgaggcatggaggtcgcactgaagagaagctcagtctttgtgccccctctccatgtcccagctagagccacctggggataggtgtagttgtgaagacgccctaatacagacatggaacgagaagatggagggggaagaggagggaggtgggggataaggcagcggcgatgagggctctgcccatgggtgggatggtttcccatgagaaggaggtcagcaaagggcagatgagagccgctgcctggtgcaggctctggcagaaggaagtccggctcagagagccagtctgatatgtatatttattctagaagaatggccattagcaaaagaaaatagagattacgccctcatggctcccaggagccgcgaggcaggctggagtcacagctgctccaagagggctcaggcttggcctgaggaagaaactctgtgcacagatgttgacttaactggagcgttttcctttttcacttgcgatgacaggattcctatgagttgtccctgcgccctacacttaactcttaatgtaactgatttgtgtcgctgcaatttcacagataaaatgtgagaaatttgtttttctctctgcagtctcccccctccgtcttggctttgtttgcgttctctctccccttcccctgccagttccagtcatccaggcgtttacatgcctcattaagcacgtcgcactctctgcagtgccagatgtaatcaagtccagaatcttccttctctgcacactaaggacaggatggggggatggggcttcttgctcaaggcccagaggggacaaagggggttggcgaactgagagaaagtgagtcacctccacaagggacagagctgtggtcagcaagctgaaacccagccacccctgctgtacttaggcctggcaagacttcgaggtgccaaggggctccctgtggaccttccaatggctgcacccactcagtaaagctaacgaatgcttagagcaagctgatttgcaatggttggagcaagctactgtgcaaagattgtccatggttatggttgatagcttttggagacctgttccttgccttttgttcccattgtttcccaaattcagcccagacacttagaaagctgaaagtaaccttggagttcatcttgctctgcttttctgttttacgcatgacttaggaacagacagcatcacagtttgtctgtatcagagtcaggactggaaccccgtgttccttgctgctggcgttgaccgcctttccacatcgggccacttttccagcacctgcagttgcctggggctaaggaaagtgggtggtctaaaatatggctgtgagttggcgctctgcctagctgaccactctgtccttgtggctctgtgtggggaaggcaaccggtgtgataaagaagaagcatttcatatcagtgccaacagctgtttcatcttggacgatcacctaccatgttgtcactcacacgtttctagtcatttcaggtttccaaccactcaccaacccattgtctccagtttttgccctctgcattctttcaaaattgcttatatcccattttcctttgctctttgcttgtaggtatgaaatatataaaagatgtagtgtgagagaggcacgctgtgaagggatcacggggcagagtcaaagagggctctcagaaaacagactgaccgtctgtgagagtaaatacaaatgcatgcctgcagatggggactgtgtgttggggaagtaggagcatacgggttgcaaatctaaaaattgtcctttacaagaatggcttcagaagtagatagaagaaaggagaatttgatgtgggagatgggtccaagaagactaattgctgatatgaggctccatttggaaagtcaccatgtccatgatgggttgccaggtcttatgagctggattgcaataggagcaaagtgctccagcatgggaatgggagtatatagcctcaaatcccagcacaagcactgataagccagggtgttttgagttatctgcctaacctctcaatttcctcaagtgtaaaatcaggataaatatagtacttacttcatagagtcactaagggtgataaaaaaggaaaagcacttagtctagtaccctgtacacagtaaatggttggtaataattaggcataattatgggggcattgaggactaggaagagcatccctggccaggagaaagagcaggtcaaccagacactatctgtctgatcttgtgctgaaactattgccacacagtcataggatcagagaattgtgccttgtagggaccacagaaaccaaacatcttatccaaaatgccttcactgattaaaaatataaaagacccactgagattgaccttcccaaagccattcagccagcgagcagcatagggtgagacacataccccttcctctatgccatggcatttcaattcctgacagctaaattgtggctgtgaccaatacgtcctttccatccccacatatattcacacattcattcattccacaaagttttcctgtgagctactgtgtgtagaaccttgtattaggtcctagggattaagccaggtatagcccctatgttcctggagcttacaggataaagaggaagaaatactttaaacaaacaacttttgaaatattaaacaaaaacaaaattacaactagaagataaagtctatagaaacaaggaatctatctgttgagtcactgctgtctcctgatcacatagaacagtgcctggcttgtaacgggtcctaaatgcatgtttgctaaatgaatgctagacaatgctctgtgtgagtgcagcagtcaaaggcgcggaatgagtggatgcagaattggggactggcctgctcagagaggtcaggaaagtcttccttcaggaagggatgctgaatgcaagtgtgtgccaacagggtgaagtgagatagggtgggttatagggaccgtgaatgctggagaggaagggcacaggggactttggaggaaggaaaagaagtccagttgagcagtgactctggcaggcatatggggggaagaggcgatagcatgggccatgtcacaataagtgttggcgggtaccagtagaaacacgacagtattcagtgagtcatgccgctttgatgaacattgtcttattgacaattcacagtgacactctcatgtccacaggtcagaaaatatcaccctacttagccgagtggactcaggcctgtggtttttgtttgtggtcgaatccacacatctaaatgtagcatttatgggattctgaatggacacaacctgatttaatcctgtcaccagtctcttgaagcaggcgttaatgtcccaatagcatatatgcgggaaggaagactcagcaagtttaagtgaattgggatgtgaaggctgaattgggatgtaaatgtctgcctgtgctatgggctgaatcgcatccctctactaccgaatgtctatgttgatgctctaacccccagtatgtctgtatttggaggtggcacctatagggaagtaattaaggttaagtgaggtcataagggtgggaccctgatccaatatagttactgtccttatcagaagagacaccagaaagctccctctctctctttttctatgagaattcagaggagaaaccatgtgaggacatagcagctgtctgcaagccatgaggtgagccctcacaggaaccaccttggcagaaacctgcatcttggacttctagcctccaggactttgagataataaatgtctgttgtttaagctatcccatcggtagtattttgttacagcaacacaagccaactaagacagttttggtatacactggttgttgttatctgccatgacacacctctttcttagtgaagggcagagagagacaagaagggccattgggttgtcagtcctgtgcccttctctgcatcatactccctgcaacagcaatcccaccaaccatggggataatggcaggttgtggcagggaagtgactcaatcccaccctatcctctcagtgtttttaagactaaggcatgggtgttcctggtcactgggatgcgggcagcactatacatctgtgagtgtcttggatcaagagctgtgagcagtgatagttgaggagctgatttcaggtctagaaaattcaaatgtcatctctttgcatgtgaatgagattgacatcttagaacagtagggttgagggtcttccagttctggaagcagagctgagcagcagctactgcttcttctaaatgcctcagcgactgtgtaagagtgtgtgtgagtgcatgcatgtgtgtgcctgtttctctttgctgacgctgtgggcaaatgctccaatacctaatacagggctccatctctaggtctcatccagtatctattcattagctaagtggtcttcagtgttacccaagctctttagtcctcctttcacttacctgtaaaatggggttaataacctgccttgcacagccctgacatgatgcctagaaaccagtacacgtttggtaaatagcagatattatgattataataatgatcccaagtacttttattttaaaataaagtttttagaactaaaccattagccctgtttgccttgggctaaaagaataaaacattcatagtagggtgacgtccccactgagacagttatctattaatccagttggtctctgggctgggttgctcttggtgctgctgtgtacagaaatagcagaatgagcattcttttcaaagatgaccaaatataaggttcttgttttgggggcaaaaaccccttcccctgaaacacataaagctattccacagagtgcatttgaaagccatcatattctacatgcttattatctaaactgtgtaaaccaagccccttgaggtctatctacctcagagacataaattacagaggtgaagcaggcaagcctatctttgaagtaggctaaaactcaaaggcataggcattcaggcaggcagaggtaggaaggaacatgctgtacccacctgccactgctgatgaggggcttatttctaagacacacacagcacaatgcacacacaatgcagagagaaaacaaaagacatagatcacacatttcagatggttggtggacaaagtttacttaatgtcagtgctgaaagcttgtgtctgaggtgcacgtggaaacgtggatacctctcttcatccttcatcctctcatcctactcatcggatgcttccctctaatcaaacctcagcaaataaacaaatacatatgcacatacagtatcacaacaagctggccctggcccatggtgtgaaatgttgcagaaggatatggatgcggcagtgtgggaaaatggagttagggagacataggggctttaaaggaggtcagtcctggctcccaagccttctccacccatatgggagggaaagatcttcagagagggtttgctgctccagttgtggatagagcagccacctgataaggtctcagactactactccattcttccccatggatgagaatacgaaatgcaagcaacatgagaatcatgatggaagcaggtgacttggtttaaagcaacaaatatcacccccagaatcagagactccaactacagaaggcatcttaaaattacacagttgaattgacccatggttctatcttctttatacaaaaaccattctacctgattcacagtttggtttactgctattgtaagggcaaactttgccttttaatgaccatgaaatatcaattactgtgtaactatctctgcatggcatgctaggggaatggcagggagaagtatgtcttatctacaggtggtgggttgagtaggatggatggacacaggccaagcagattgcaacttcctccctcctgagtccctcaagcttccccatgtggctgagcccactgcatccaggcttccagcactcaccatacaatgtgatgctggcattggtgttcccaagcttgttcgtggccacacaagtatagttcccataatccttttctgaaacattgaagaaagtcagagtggacatgcggcctttgttttcaatcctcattccatccagaccagtggctaacctgcaagagggaagacattgctatcaattcattctacaaagaggccctcctcctcaccaaactcttttctccaactaatctcgtccttcaaactcaaaccctaagcacttcagtgtccaacaggaggagaagggaaatgatgctcttgcccaatgggataaatgtactggcttctaattcccaacgactgacatgtctacaaccagtctcagattcagaatcatggtcagttcattttctccacttcccagcctcctccattttttttctcgttgtaaaaatagactttgttacaaaagagggcatagtatatttctgttttgccttatctttccccttttcttcatcctcatccttctcccatgtggggatagaccatcagctctgcttcagaactgtccaggtgtcatttaaaaggtacctggtttcttccttgaaccactggaattcagccatggggactgcagaggcttcacagctcaggatgcccttctgaccgactgaaacaccagtgttcttggcttttgagatatagggaggatctgtgggaaacacacacacacacatgcacaggcatgcacgcacgcacacacagagtgatttcgtgaaagagatgaagggcacatccagccatttgctatgtaaatggatttcttgtgacaaccctctttcccagtaaaataatcatttatttcaggaaaaataagctgcttgaagatactgcattgaccccaacctctttttcaggcctccaaacccattctcagttaacaattctctccatttgctgaaaactctggcagtcacaggaagattccagggacaaatggcacggaggccatggtgggcaaagccatctgatgaagtattttcctgttggcaggaacctgggtcctttggaaaatggcactgccattaccagattgtccacctactccctgtgccgtcttttccccagaaccccctggctgcaggtccactcacagtttacagtgatttttactttccgcacatcgggcgcagcgacatcgttcaacgcgctgcattcgtactccccggactggtctcgcttgatgtcagagatctccaggtactcatcctcacttacaaagccctggccttctgggaagaaagaagcagacaggaaacaatcaggaaactgtgtaaccagggacagaaccatattcacatctagagattgtaggaggaggaagagaaaaagccatcagaatggagtaggacatcaagtcaaagacatagggcatcatgttgctcaaaagatacggcaaaggaagaaagaaattctgtgcttgagtcttgcatcaatgtattttcagtcaagtcacttaactttcttagagcatttggtaagaacatgtcattatttttcttatatgattattgtgataattaactcagagatgacatgataaatacttcagtgcattgccaaactgatattttaaaaagaactgtcatgatcaataatataataaaactatggaataactttagggtatgttactgtggagcacatcttaatttttcatttgtagaaatgtttttgtatgcagaatacaaactactacttgtagaacgaataagtaagcattctaccctttaatataaatagatgcaaagtagttggttttgtttccacctgtgttggagaagatagagtgagaatgaatgaacgaggaaggaccccacgatggctttgtaatagatgctcaataagcattggccaacacaaatgtgatagccccaaatgctggatctgtggttgccagaatagcctagtggatttaatactcaatttggtggagctccctggaggattcattctcaggtacttgtgaaacttgtcatttataattcaaaatattatgggctgcaaaatttgtattgcttttatgccaccattacaggttcttgcaacaatctggcctctccgccttaccccttatcttactccctgtggttcagtgcaaagacaacagaccctctgtcttccatcacaaatgttctgagttctgtcaaaacactgagatcccatcaaaaccaagataaagcccaaggataaggcacagccatttgcatttcttataggcctgcagtcctgagggccacagtagttttcagggcaacaaaagtgtgagctttcgccacaaccttgtgcaagcatgttctaatccaatgggtttgggtccaccatggatgtgaagcaggaaggtgtctgtggagggggtgggccagtgtgtaggacataggatgtggagcaggaacgtgtctgtggaggtgggatggtgtgcaagtgtatagggtgggcagcaggaaggtggaaggtggggacagtgtgtagggtgtagggtgtgcagcaggaatgtgtctgtggagatgggctggtgtccagggtatagggtgtgcagcagaaaggtgtctgtggaggtgggccagtgtgcagggtgtagggtgtgcagcaggaaggtggaggaggtgggctagtgtgtagtgtgtaaggtgtgcagcagtaagggtctgtggaggtgggcttgggtatagggggtaaggaggcaggtacttaggtgccctgactctgctccaagtctaagccttgggggcttccaccacccacctacccatttccccagaccatgtgctttctggctcttgttgtcttccctgcctccatgtcctaccccaggtcatgcccacccagggagtaccatcagtctctggatactggctaccaatcatctatttatagaaatgtcactgcaaatcagcaccgttctgttagtccaatctgtgcaattccatggaggaaataatgcattggctagtgggagcaatccatttgcctggctaccctcctcaaacctggtcctggtgacagggtcccaaaatgtacccatagatgtgaggttcagagtcattgggaaatctgggtggacccacataagaagtggctgaagggtgcagggtgaaagatccccagactgaagaaatggggtctgaaatagtgacccacatgctcccagcctaggatctgagcgtctctcctgaatgatgctgctcacccccgatggttccagccaccagatgggaacttagacaatttcaagaaagaaactccagagcatgcgccacctgggtctgggttaagccggcatttgctggatggtgctactggatcaaaagcctctaccacagcagacataatgatccaggctagttcatacactaactcttcaaggtgcattacggttatgcaaacactttcttgccctactccctttatttctctataggctaacagaatatcatagtgaaagggattctgagattactttttaaatgaaatttaacaaagaaaaattagttgatcaatctaagcctttttaaggattaaacaacaatggaatcaaacacatcaaaatgacgttccagacacctcgccattttttttttttttcctgaaagaaataaatgtggtagaatgagaagcctggatttctactacgatgactccattattttttcaaaatgtaccacagaggattttgccatgagtaattaaattgcattgcatttaaccaaacacatgggctacctgctgagggcctggctagagtctcaggcagggtcaacgttcccctttccttagagagaagaaagacccagatcatgctgcttggtggacctcagccagatgccttaaaagcttcagataaaatgagatccatgaatgccagtagacttagaaatgttgacctacacgtagggaggggatggtttcacagaatggggaggcccgtgtgcatttacatgggtaagacaggtcctgcatccttccagtggaattaccagatgacatggcaacttctggaatgtgggatttgttttcactgtctgtgatgctgtttttatgggaccagttatgcaacagcagaaatggaaggaaggaaggaagaaaaagtgcatttcatgtaaaatggggatcgttataatactacctcattaagtgagaaaatgagttttgtcaagtttgtacaatgtgcttctcagattttaatttgcatataaattctttagagttttttttttttttaaatatagattctgatccagtaggtctggagtggagtctgggattccacgtttctgacacatgcccaggggctgcctccatggctgggccggggcccccaccctgagcagtgaagctgtgatgcactgtgccgcgctgttcgtgggctctctcccacccacacacgtgaagtcttctagggtcagtgtgttaggaaaatatactaagagcccctcaggctgagacccttgtggagcctgcccctccaaggactcactgttcttggagtttagggctcagtaggctggctacactgaggctgagaatcaggatgcatggattcttcatgatcttcccacataacatgcatcctcaccaaaacatgtttcttcgttgaaaaagggaaaatgttgttgaaacttctctccatctcagactcagtgaaggtgacttacctgttattttcttaactactttgaatgctgggtgaaatttttaaagcagaatgaatctaggttgctacttgcctggagacctaggaagctgtagggctgccctctccagttctggttgcaatgtaaagttctgattccatgctgcagataatggggcagaaggcaatcaatgttttaatcctctttactagctgccaggaaaccaaattgctgactatgagttaaaggaaggaaaacgggcagggagaaacagatgagggaggaacaggataggataggaaggagagggaggaggaaggaaagaaagacagaggtggggtaagcaagatggcctgtgagccattggaaagattctgaagatgtgttcaccaaggacttttttgttttttttttttttttttttgagacggagtttcgctctgtcgcccaggctggagtgcagtggcgggatctcggctcactgcaagctccgcctcccgggttcacgccattctcctgcctcagcctcccaagtagctgggactgcaggcgcccgccactacgcccggctaatttttttgtatttttagtagagacggggtttcaccgttttagccgggatggtctcgatctcctgacctcgtgatccgcccgcctcggcctcccaaagtgctgggattacaggcgtgagccaccgcgcccggcccaccaaggacttttttaaaaaggctgtaagactgcaatattttccttgtcaaacaggaactgcaagtctgctcaacagttttgctttatagcaaaatgtcctgtagtaagacaataacccagaggcattatgaacctgctctaagcactccagcatcccaatataacaaggttggaagcaacagaaagcagattctgaatcactggaagaaatatgtaaaaactgaggctgtttccatggaaagagtgcctcaaagaagatgagttcaattcactgcattagcaaaattaagatctgcaaaaatacaaatgaggccattcatccggggatgtgggggttgttgcctcagatgcaggttgcatccttggggataggatgagcagaagcctcagggttctgtggatctaagggggctttttcagtagggacacacattccaacagcacagtcacagaatacaaagagcatgaaacatccacaagcagggtctgttctgctagaaatggaggaacagacagaaaaacaactcaggggagaaggaccactggctggcctgctggctctgacctcactgcacttattctgctcacatccaggatgagcgaggtgttgtgtcagacgctgtggtgagggaatgggggcagagacaatatggaaaacaaggatcttcaccttgcatagtctgcaatctcatggggccaggactcaaagcagtttatatttttctgtatcttaggctcaattttttagttctttgtcatttctagatgcctcaagtaaggtgtagtgagtcaaacagatttattagagctgagagaaacctaactatttggggatgaaaaagatcaaacaggaaatccagagcaaaatatgggggcttcctgaccgacttctcttttctttctccctttatgtccttttgtgccagcgatatctcagccatcaatcttgcatccaattttcctgtttattgcctcagccaattccttagagttataaagttaaaagaaccatgaggggtcaaagattttagccttccacttttttggattatacaaagtcctgacaaaatatcttatcttctctctgaatacctctggggacaattttaggaggtgaagatagggtttggcagtgtccccacccaaatctcaccttgaattgtaattatccccacgtgtcaagggcagggccaggtggaaatgattgaatcatgggcgcagttcccccatactgtagtcttggtagtgaagaagtcttatgagatctgatgggtttataaatgggagttcccctgcacaagcttcttgcctgctgccatgtaagatgtcccttgctcttccactatgactgtgaggcttccccagccatgtggaactgtgagtcgattaaacctctttgctttataaattccccagtctcgggtgtgtctttattagcagcgtaagaacaggctaaacaggtgacctgtccctttgttggtctattcacagtatgcaaaaacaaaacaaaacaaaaaaaacttggtgttgaggcaatccccatctggtttctccatttggaatgattaaaagtcacctctaagcatctccaccctgactgtccttctaggtttgctgtctagggcatggctctacctgcagaagctgcgctgagataaaatgccagcaactgctgcagcatgtaccagaccagccaggaggtaacacagagagcaacatttctgggggcttgtgccaccaaggaaaagaacaacaggagatgagagcagtgaggaggatctagggtttcaggaggcagccacacagggaggacaaggtgtggggaaggggaagtgggaggagcaagaaagcaagagggaaatgagctgccagaaggaagccagtgggagtgggcagagggtggccacccaggggtctttttggctcacatggttgggtttctgggaaaacaagaaaaggagtttccctgctgcccagcaagagagactattacagacgatcctgatcaacactgaatttgcaaagttggaatcaaatgtccaggtgattgacgaccaagtgcatgcctctggcctgtaaggccacaactaggctgcctgaaccatcttagaaacaagccttttacccactctcaaaagctaggtcacaattcaagctgtcaaggaacacagattttacttctgtaagggaagaaccatgtttgtaaatatctgctggacatcctgtcatggacatctggagtaagatagaccacaggaaggagataaggctgtctgaaaccacctcctccccactgcttcttgtccttgatatgtgcagggaaaggtacagactgtcaaaagttcctgaggagacatgtgcctgaatcctatcactcatctttctttccctccaggattttggctaatagaacataatcacaaaactgagctatgagcagatcaaaacatccgctgggctacaatccccacttgggatccaaggctgacatgaggttcttgcctttctctctgagaattagagacagtgggacttgcacagtagaatgcttgactttagtactcagtcacaggctcaaagtggacccgagagtatgagctgtgtcgcaatgcagagtctggggtaaggaggacgccagacccaggtatcaggccagggaggggatggagacacaggagtaatgccttcacttctagatggcagccttatgtcttcttaactaggcccaataaatgcccaagcaaccacttcaccatgacgttggtcacccgcctcccatgggggaggcaaagagtggacagggtggaggaaagctgccctctagaaacctgtgagggttatgaataggacttctccttttatcctagagatctcctggcatccttctccatcacatacctcctgatgtgagagcccccttcttttgaaggatacacatcagaaacatgcatgaatttggaattacggtagagttttagcatttgggacccagtatggctcatataacctgagtcttgtactgtttacccttcttcctagtccattgtccaagttgcaagcaccctgagtagatgtcacatcttctacttccttaactcattacagcagctaacgtaggctaagcccacagtatgtgttcacattatgcctgatggctaggtttgaaaacttaatccctgcagaactccccctctccctctcctatttaatccactctctttctgccaggctctgccccacattttctgtccccaactccgtcccccgccccaacctccaatccttgactctccttagaaccctactggcaacaagcaactctgagcccgccctccttaattaaaccaaggaatgtggacagcagtacattgcatccttgcctgctcccaacttccagatttgttacctttgctgcattggagttaatgaaaagtgtgataaacccactgtttcattttcctttaattaacacaagcaattgaattgtgctaaagtcattttggtttggaggccaagcgcctggtcaatgtctcacttgctggcggtgacagaagctctttgttttgggctcagaaacctttctcaggctgtggccaccaggacctcctctgcgggaggagtggcttgcccccatccagggcggccatgctggctgccttccctgaggctgacagtaagttggctaatcacaagatcaatgtgttactgtgaaagttaactgtgcttccagtgggggaaggagtacattaataaagatctccatagctgggggctcagaggaattccctggcaggggtgagttttctagatcctcccttccatgcatgtgtgagaatgatggaagtgtttaatgcccctcactgtcagaccgggagtagccgaggatgacacaaagacaaaaggactcaagtgactcctccagtacaactgtccccaaagagaaactctcatacactggggctcttgaactctttaccgggaaaagttaaagaggagaggacctaaagggttttgtcttgtaggtggaggcagaagaagggatggcaaggaaactctctgaaatcaggtttaagaggatacacctaaaatagatgttctcatccctggggggtcatgagacttacccaaggagcactttaaaaatagactcttgtgttcatgcttatggatggtgaacatggtctggggtgaggggtcccagcaccagcatcctctaaaacttcccaggggactctaatgtacagtcaggggtgagaattcagggttggtaagttgaggactcctgttgctttcattttccaagttccagttacacatgtatgctcccaggcttcctctgctgagaagtcattcagagccaaggagtgtatgaggatgtgcacatcttacagtgtgctcagatctcctgtcaactgtcagcttctatgaaaaatataccatcatgatgtcaacagcagcagctttattgtaggtgggtcaggaaaaagaaatcttgtggtggggtagggtggtgatagccaggtcagtctccagcagctagagatccccagatagtcaaacgaagagcatgaagacaagaggcttctttccaaagcacagtgaagaggtgtgtttagcttggctctgcttgtgtctttttttttttttttttttttttttttgagatgggttcattatgtgtgggaagaatcaagacacaacatttttaggatctggatgatactgttgactcattgggagtggttctgagtgagtgtcacagaaacagccagggtacctgtgaggatgtggcacattccctttaaatgaaagtgcagtatgtgtgccagaaaaggaagagaggagctagacagagaggcagaggagggagggagggagggaggaagagagagagagaatgaggatgcaaaacactagaattccatacaggcagacaaatgactgaggatagaagcttaaatccatttgatgagcagagtagcctatttgggccaaaaaaagtcgctagcatttttattctaaaaagtataaaaaataaactgaaactaacagttcagacccaaagaatgcaggggtagaaggagaaaaatcattatttttacatagtagagcttaaacagctaagttattgacaaaatgtttaagtacacttgaaaagtttttatttattttacacattttccccttatgattatgattatttggattctaaaccaacagggttactttagtatcaacaagctaaagtgaaatgagttctgagaagtaaaagtactgctttaaaaaaaaaccttcataattaaacgacagcattttttttagaaacctgatcaatgcatggaaggagacactgcctctttcatttacaatgtctaaagaaagttgccttaaccttgtctgcagcaacctactcaagcacagccagtcacccaggcccagtttcttcaagaaggctgtatttttgtagtataggagtgtcttgtgccctggcgtggtcagtggactgccaatactgtgttacctaagggcgctttggcaaagtggcttcttgagcccaaagcagacctacagggctggcatctgccagcagatgggcagtatacaaaaccttcaattagttacaacatcaaagtaagtcctttgccctttgcttgcctttgggggaattaaaactttccttctaatgccaactgcgtctgacttgttttccctgaggattaatttattcgtatagcagtgtcaggaatgcctttgttgttttcctgagctgggtggacccatagttaggttttcctgggatagtgccagttgacacctgtcttcccaatgtactttgttttcttttgagacagagtttcacgctctcttgcccagacaggagtgcagtggcgcaatcttggctcactgcaacctccacatcctgggttcaagcaattctcctgcctcagcctcctgaatacctgggactacaggtgcatgcaccatgcccagttaattttttttttttttttgtattttttagtagagacagggtttcaccatgttgcccaggctggtctcgaactcctgagctcagtcaatccacctgccttggcctcccaaagtgacagaattacaggcgtgagccaccatacccggtcgacagtgtactttttaactgtcacctttcattctttaaagtacactggtctggatcataaaccaggtggccgacatactcctagcctactgaaaggtctgctgtcaggccctagggccttagctactggtgacatcttactctgtgcctggggcaggcccaacactcaaccttcttaagagaggcagtggcttaggaccaaatagggtgtggccgctccaatgtaggactctgctggactgatggtcaagaaagattctgtgtgctctctttctcccagagctccaggctcatcagctatactcttctctggaagacagacaattgcagctggttggagcctaagccaaccagagagggaatcagcactgcagcccccaggagaaggaaagccagcaagggctcaagggctcttggctcaaagtcctggcagaccaagtaccagacctgcccctttctgaagtggttgggatggcccagagcactgaaagaaatagtcctagggtcttttcagggtattggggaaatgcccttttgaggaacagcacagctcagttcctgcagatgaagccttgatgcagcctgactcttcttacttcctctctttctttccttttatttgatgctgtctcttttatcctttccctatattagttcctggcatcacagccgtttaacaatgatgccaaccatcagcattcatcaatattttcaaaatacttgtattagcttgtaggcaaagtacccactaacccaggcagcacaattggcatgcaagccacaaccagagacatcctgcacacttcgcagagcataaaggtctgagctctgaagtatcacgaggagatagcattgctcatgcactgagccctagtgtgcactgagaggaaaggatcaggagctgtgcactcaaggggcgaagtctccactaggggcaggggtccctttgaaaacttagctggcaagggctctcctcatctgcaccttgtgctattctaggcaagtctgtctccctcttaccatctacctcagactatgataagctgacttctcaccaaaggcatctgtcttgctagcctcccttcttagcctagtcacccaagaagtcactttatatgaccttctgtgactcatgctaacagtagaactcaaggaggaaaccactgaatttgagatcagaagaccgaggatctaatcccagttttgtcacaaatatgtgatttttcagtaagtgttttcagcccttcaaaccacaattattttttctgtcaatacaaaaattgcatcagatgacctccaaggtcactatccattttaatgttttataacctttcatcacctagcaatatggtctatgactaaggaacccaaataattccttaagttctggaaatctgataatcatggcattgatggactgagttccaacccaggagctcagggtcactgtcccacaaaggagcataaggtccctgcagagctggcccaggccacactggctttatttgaggtcttgacagtccacacacaaaaatagagacaccatgacaatttcaaggtagctctcatctgtcactgtgctttagctgcttggtgatggggaggaaagagaggttttgacaattatgaaggactatgtgtgtctgaacgtaatgtcttgtgttaatgggggaaattaattctttcctttcctttctaagattctattcatgtagatcttgacaagtagctgttctttcctccctctccttgatgggtagactggaataatgtctcataggtataactaatcatccacttagatgatttgaggcccattttcatgcgtctgagggtacacttcaaatgcaggaaaatgatgcttctacctactttctgtcctcctcgcctttactaaaaatatcccttcttagttacatggctcacttcgctaatccttcccaaccagatacagagcaaccaggaaaggggctgccaggacagtgaagacaattccagtatgatgcccaaactttcagctttacatcaactgttataaccggactgtgactacggcagctcagcaccaacaggttcagaggtgccaaatggaagctgaggaggccaaggtttcggcctttgctctgccactaactagccaggacccctgagcaggccactttacttcatccagcctcggtttctttatctgcaaaacgaggggatccggccagctcatttcttaggtcgctcagccactgctctttcctggctcttttcatgagggtctttctggaccagaagatagagattctgtgcactctcccccaatccttggacagcactcgacatttgatttgggctcggagcttctaggaagtgaagtttggaggtgtgagttctgtttctgccccagaaacctgcgctggctctggttctgggagatggagccttgagcatgctgtgatgtgacatggtggctgcagccagggctggtcgtcctccaaagcaccctgcccaggccccaggggagacagacccctgccttccttgctgggtcttcatgtgcttcctcatcactacactccaggccttgatcaaataaacgcatctgacctattcctagattgtttcccaccagcccaaattagtttatcagttttgtttttgttgccttaggaagcatggagcctccatcttcttggcagaaaatgtcgctgtgagggagaaagacaaagaggaacgcaaggtgactagggctccaacagagcaggcctggactgcaggatcgtggatagaaacaggtagtttggaagaggctgctgcacaggaaaccatatggggcgggtgctggagcctggtgcctcgacggtggtgtctgcagatttttagggctgcccgtagaggggcctcctgcagaaaatgagtcatgatggagaggcagccaccgttccaatgcagtgagcttactctacttccactggactctagagggtttttttttttcaattatagaatatcgtatcctgagagtaagtcacgaaattaatgtaaaaaacagtgtgatatttattgctttctgcacatacacagacagacacacaagtgttataaatgcatggcagtaaagaaagtaagatgcagggtgattcttttcaaaccttcctcaccattgaggaagtaacaccacactaggctcaggagtgattatgactttctgtgtccatttggataaattgcgtaaccaccctaggcttcttgttctgtcattagttaaaataatggggtggggtttgatgatttctaaaaagcgttagctctaattttcgatagtcagtagctgtttgaaaagtaacatgtgttccttccaaccattgactcaatgtgtgtgtgtgtgcatgggtgtgtgtatgtgtgtataaagagaaacacagctaaataaggaataaatctcacctagaatctcatgagaagagacaaagcaataagaaagccctaaagaggcttgagcttagcaaatcagaaggcaattcatcttgagaagaaaacaagtgatatttacattattaaatctcaattacaaagcaaatcagctgcagaagagaagagaccatttccatcaattattactgagctgaacataatttttctatcaccagcagattgtaaatgggggctacagctcatccaggaactcttctatcataggagttattaatcgggtattaactttgtcgaattagcaaggacactgacgagatggtgagggaagcaggaagggtatagggctggggcgggggtgggggcgcagacgggaggacacagcaggtgaattcctgagaccacagaggcacagaacactctagaaggcctgggatcagtcctttatgcagctggtctggcttctgtgttgaagaaaatacccagctctggggttttcagtcccaaaaagtcaacacatgaacaggtaaaaataaaaaatagcaccttcttgactggcgattccattcctgtttaggagcactgaggggatgccaggactctgcacagctctaggtgaggggtgcggctctgttgctgcccctgctgtggggcctccatctagggccctaaaagtctgagtgcctcctactgggtggaaggtgtgggccatccatcccatcagaacctcatgtagattggtggagaacaaaagcacaaacaaaagactttttttgtgtgtgttccatcaatgtgctgcagttccttatgggtctcagtaaaaactgttatcaacgcagtaactttctaggttttttgtgccccgttttctctcttcctctgtattaccagtttttcaaactctgccctcactggatttctgtgcggtacagagtaggtttcaattcccctaaaccgctttgctccctccctgggttcaatgtcacgctcctccattgtcacaggacaggctaggctattggataactgatttgtgttctgttctcaaagctgtagaagaatggaaggaatgagaaacattttccctgccccatccccaaaaatgtggcaggccctgcaaatcctcaattcttagcttcttgcctcagagttgttaatgacttttgtgtcatggggtctaaagcagttgctaggcacccagaagattattactattcaagcttttgtttcacagaaacaagcaaacagagtctaggctcacggaggtgggtgggcaccaagctgggggaggatgaaaggtccaaagcttgggtttgtgaaggagtccccaccagtggcagactacctgtcatttcccacgatctccaaggcagacctccagtcagcgacagcacctcacactgggtgacgatgaagctggatctaaaagctgtgatccaccagcctgccctccctccctcccttcctcacttccttccttccttccttccttccttctttcagcctgcctgcctgcctgccttccttttttccttccttcctgcctgccttcctactttccttccttcctgcctgccttcctactttccttccttcttgccttccttccttcttcacctccttttttcatgtcctccctcacttcctttgttccttcactcaacaaacatttttgaactcttacacaataagcctaccactaaggactaataactaaagaccctttctcagcattctgtatactccagtgaggaaagacagtctcccaaaatatgactcagattgaatttctcaccagccagacgggcagccccaacaaatcaaccatgaacacaaacattcttataagtgagatttcaaacatagaaataataggtgtcattcatataccacccctcctcctttcccctggacatatctgaccttgcttataagtctcctctgtatagtctccctgcaccatgcccacatcttgtaagggattgtcttattcaggctgcctagagttgctcaaagttgaagatgccatctatttcccactgggctcttgactgttatgacttccttgactttagggtctttgttagatgcccctcatctgggttcctgtagaacgtacatttatcttcgcatttgtcatgttagagcagtaattctcaacctggtaattttgtccacaggatacatttggcagtgtctagagacagttttggtctttatggctgaggttaggaaagctgtactacattgcacaggacagtctcccttgacaaataattatctgaccccaaatatcactagcaccaaagctgagaaacctgcaccaaaatgtaaatgcgtattgaatcgctgacatctcccactagagagaaggaagctcggtgactacaaagaccatccatttcattcccaggggcatccccagggccgggtgtaattcctaacacatgatcgggccccacaaaaggaccgcagaaaaatacaaagaacgagtgagtccattcagcaacaaaatgcagtgccagtcttatgtcatctaattgtctagtgctgagggtaagactgattactcataactaaatataagcttagcaagaaataacccaaaaaatgcatggtgattaagcccctcggcagggtttcgaggacagagcagatactatttagctggttgggcgtggggctggtacaaagaaacatagctctggctacaggcagtgctcaaagaagccttgaaatgttctcacttcagcaggcagaactgggatggcacagagggtagggacacagcatggacagggtgaggaggaagagacattctggaattcacactgcaggttatttccttactggtactacttttctgaggaacattgctgatgactcttggctaagtggattctggttgcagaagacaattctgcccttctaagtgaactgaaggaaattgcagtcatgtggcaactgctattttcatgttttgccttctcaacatagtttgtcacttctatatgattagcaagggaagatgcctactatgtgcacaacacatgctaggtttttgcgggggaaggttaagaaaccaggactggcaaatagacatcattcaacatgtatctattgcatcaaatcctgcaaagcacattgtttcttaattggtctcatttgtatggtctataattttagacttcaaaggatgagagggtcacctttagctttcgttgctagttttacagacccagcttctcccaggtcataacttgttcctgggaaatgaggtctgagaaaatcagtgtttgcatccattcctgggagataactaatctgaaaagtgtgatggtggaagcctgatttggaagggtgaggaccgatgctcagtgagccagagcccactcttccgaggtcaggcttcagtgggctaatatctcatcaggaggcaccaggccctcactatcctgcggtaacagcccctctactgcggagatgctccactgcctcttccacacactgctcactgcgacagcctcgcagagggctcccagctgaggacagaggacagatgatgggagaagccagcacccagggccttcgggaacatggcagcagccatgttgaatagggtttgtggctttctgtaacctattaaattttgcccattacagagaggagagaagggctgccttcagatccaatctagcctactctatgggaaacaggatgaactgacttgttggaaatccacaccagcacataaattgcttcataactgcagggacatataatatctgcacacagccagtatgcacaccccctagaagggatgtgattttcagtctaaaatgtcaatttatttttttcagtagggtttaataatcatgctctgaccctggactgaataaacatgtcaggggcattgccagtataacatctgactaaccttttcctgtgagacatttgtaatttcatgaacagagtataagaccattataatagaatgtatcacataaacctggatatattacaggtcgaaccctgtctcctaaaacataacagctacattcttaaacgatcttatctaaatcccatgctcctcataccagcattgcaaaaagtttcacagagtttgcgcatctcatttctgtttaattgtacactctgtaaattaagcacagaaccacagccttcctttactttgcaaatgatcacacagtgtattgtacacccatctggtgggcgcctcagagatgccaactggctgcttagcctgagagaagcctggagtgtgcagtgacctgagatggcttacatgctaccggtgagattcccttaactcaaaaggtcacctccttcccatagcagtgtccctgtgggactggatggttccctgcaagtaataaccacttctaatagggcagaaacaaataggacttgaggttcccgtgggcaaaggttaaatcttcaaatccgccctcgagtgagatccctttgagatgccacttaggagcatgctatctcccttgctggagatagtctttgtttacatttgttcatcttctgtaatatggatgccagtcccgtcattttcaaaacggtctcagtgtagacactacattatatgttcactgtacatttaaatcattccagactcaaaagcagttctcttgtgtttaaatatcctaagccattacatattgatagagactaccgttgtctgtcaaaaaccttctttgtcaaattcattcattcattcattcattcattcattcattcatatgtaaggcataacttactctatagactataatctctgccctcacacagcttacattttagagagaaagcacagacatcagatgacataacagatgatatgcgttagtggttattgactgtcaaacttaagtagtggaatcctctctctctctgccaataaaatcctctattaaaattttatcgagttgcaaaatctgagctgctattttggggttggggtagaggggaggtataggaattcaaggttttgtagtctagtgctcactatctcattctcacagctgttcatattgtctctctcccaccgtctctcctcgctttctctaaccctcacagagacacctacagaggttcagaggaaacctttggcattttatgaactgcagctaaaaggataaacagtttcccattgttcaggagagcacagtgcaattgagaaaacagtgcataaacatatgaaactttacataacaatgaaaaattgaacaagtcagaacaaaagaaaagatgtccaagaccttgagaattaaatagctcataattctaataaatgttagaggaattttaaggcaggagaggtcacaccgggcaggaaattttaaatttagttttagttaatttttttagagttcagggattttaatgagaagaaattccatatatctagtcaaataccctcgtgatctgtcttgctcatttccaagtgcactgttgtcagcagcaatagaaaatagctgaaaagacttcttgccttccacattagcccataatccacaaatgataaatgattctacctgtgtttcatgtagagggtggtgagggtgggtacccaactctcttccatgaagaatcaatggcattcacctaaggcatcaggtgtgggagaaagagcagtagtgaacacgtaaagtgcattggacttgtcagaggaagttatcaaataaatgtgtgttattattgtctattgagtattgttcaacatagtccaattgaaattccttaaagatttaaaccatacttttctgtaatactctatttttacaattccctgattaaacgaaagcttattaatcatgctcattaatctgtcaatgcctgcattaggcagaaggaatacagctgtgtcaggcaatcactcccttcagggatctggcagtcttgatgtgatgaagatgatgacaatagaatgtggctcatgcatggggggagggatgccgcagaggcaaggggaagacaggaggccacagaaccagactgctgtgggtggtttctgggaggagctgagacccgagctgagacccagagaatgaggatgaattagcataatcaacacattttgaaagggcattccaggcagcagaggtaccgtgtcacgaagcacagagatagagggagtcaaatgctctgaaaacacaagaggctccatgaggctgacgaattgagcagggccatgcatgagtggccttgaacacagtcgtagggcatggctgcttccgataggtaataagaccaataacacaagtggtgagacatctactctgctcttaagacgcttacaatagagttgttcagaaagaccaaacctacactgatacatttacaaacacatagaattcatgataaagagattcatgctttaacaaatatttattgagtgtcaacttgtttgaggcactgattatggatgctccgtcagtgaatgctatgggattcctgccttctatggaggaggcaggtggtaaagagataaccaaacaaataccaatataacagcaaaccttaataaggactgtgaagacatgccaaagcaataagacctccatccactaaaaagtgctgagtgatcactatgtgccaaccacttgccctgaacctttgtttccctttctctggtgctgtccatggcctgccacccagattcccaattcagggctaaagcactcctgccccagctgcctggtgtacggtctgctgagccctctggggaactgaggcaatgggctgtctcttcctatgttatgctcactcaatgccttgttgaatgaattatttcattcaacaaatatcagctattttgtgccaggcacaggtctatgcatgggtccacgctagtgaaaaggacaggcaaagtgtctgccgtggaagagcttagattccagagaggagagccagtcaacaaaccaataacatggaatttgtcaatgggtcagtgatgcaggaaaaaataaatcaagcaggttgaagtgggatgggaggtggggagatatgtgggaaagactattctatcctgagtggacagagaaggtctcttgggtaacacataagctgaggaagtaagacatgaacatgtaggggtggtgggagaaacaaaggcatttaagcagcaaaagatggacactacacaatccatgcatcaaagagcatgacgattcataaaaggatacctcagaaccccactcggacccaactaacatgcatagaagataagttgcataaatctggttatattctacccacttcctctggccaaccacagtgaacacacccctgactaggagctaaaaagtgtggattctagacttgcagtttaattatgcacagcagcaagataaagaccggtgattccttttcagcctgtcttgcatgattgctgtgaggttttgatgagacaataatataaaaggaataagaactaataagaacagcaattgtcaaacttttttcctcaggaccccatgacattcttaaacaattattgaggacttctaacaacttgctttgtagtattatgcttatcaacatttgccatgttagaaatttgaataatttttttaaaaataatgattctttttttaaaaaacactgataaacccattacattttaacgtaagtacctattacgatgaaaaataaatattttccaacataaagatcagtaaagacagttttgacattttggtaaataatgccaatgtctgccataatagagacaggtagatccccacatctgcttccacactcagtctattcaatagattgttctggttgacatatgtgaagaaaatgtagcctccctcataaagtgagggagttaggaaataaagcatttaatagccctttcagacaattgtgtgtattattcttttgtgtacaccaaaactcaacaaatggtagtttcttaaagcttaatttcagaatctgagaccatgtcaatgaatgttttgtactctgttccattaaaattcattgggccatccttcccaatgtgggcaggcatcatacaattcactgagggcctgaacagaacagaaaggcagagggagagtttgctctttctgcctgcctgctcaggctggaacaggaacccgctcctgccctctagctcacacttataccactgaccctcctggcctcaggccttcaggctgtcagccttggactagaacttccactgttggttctgctggtactcaggcctttggactccaactggaactacaccatctgctcccctgggtcttgtgcttggagaaggcaggtcttgggacttctcagcctccgtaatcatcacatgagccaattcctttctctctctctctctctcttcacacatacatacatacatacatacatacatacatacatacatatctacttcctatatatatatctacatatatataggataatatatatctatatagagaatatatatatatatatacacacatatacatatatatatagatagagagagagaaagagagagagagagagagatcctactggttctgtttctctggagaaccttgcctaatatagattccttttttgctccacatatcattttggaacattacatattggttatgtagaggatctttattcactgcgatatgcatatcttccaaatgttgacatacttcgttatacgaaagttaaaaaaaaaatcacatctgttaatattgccaccaatctcatcagaaatgtctttaggcactgggaacctgtcaagctcatgaaagcaaatacaagttttccaaagttctaattttagctcaaaagctcaaattccatttttagcaacaaatgctgtcagtggttttcgtccaagtgacaggcccacattattcattttcaagaaaagatctgctagatactcaagtgtgaataatgttgagttatatgtcagttgttttttcaaatacagtgctgttgtgggggtgggatggctacttgagctggcaaccaaacagtctaacaggtgatttttccttgggaaaacattgtactttgtgctttgggcatactgctatttcatctcacagaatgctgaaaactcatgcgttccagggttgagatgtaatcaaattaatttatgctggctcaacaagaatattcttaagttaaagtgactttttttttttttactgtgagtttgtggcagtgaggaatgcaatgactgctagcaaagccaatgatgctacattgattagtgccaaggctccaccatgtgaaacctccattgcttttgtactaacaggacaaattgggaaaggctaacaatgtcttagtattaccttgaaaacagctttgacctcacagcaataagagtttcaacctcacaaaccctctgaaagggtcttgagtatcctcaggggtcaatgaatcttactttgagaaccattgccaaagtagaaacttaaagggactgaagtcaacagggcaggaggaagatgtatggtgactaaagataaatgatatctcagcagcaaaaattgatgcttggtatcttgatggcaaagaagaataagaaaaaaatatagaaagtattcaaaagcatagcgacttggggctatcttttgcagaagcaaataatcatgcacttcaacagctccagagagaatcgccaaacttcagcactgcacaataaacacagttcacaaagacgaccttgagtcattaaaataagtttacaaaatatcacatatactacgtttaacaagccaaagaagggaaagtgttctcttaggaagcattccttagaaagagctctggagcaataattgaaattttaaaaattgctttggagttttatttagatatttacttgtgtggactagctcatttcatatgatggataaacaaagcatttcatgaattaaatgctatcccatgaaatttggtagaatgacttgttccactttatagatgggcagtagggctgagtgaggttaatgatgtacctgaggatactgagtgaacccaaggagaacagagcatgagtcaggttctgaaaaagtgaaataagtatttggtatttggtcttcctcccctctcctgacaaacagctcataaaacccttagaatctctgcagctgtaagagtgtcctttgtatgctaatgccatgactggggactgagggctcctagatagctcaggctggcagctggtcaccagaaaagcaaccaagcatatggaggaaagaggggctgcaggctgagttgaccaccaatggccaattatgtaattaatcatgcctaggatatgaagcctctatgaaattgcaaaaggactgggttcgagcaggttctggaaaggggaacacatggaggttctaaatggtggtgcatccagaaaggtcaagcaagctccatgctccttccccatacctgacgctatacatctcttcaatctgacggtttatctggatccttggtaattctctttgtaatacatgggtaaacaaaaaaatggtgtttctctgatttctgtgagctgatctgcaaattaattagaccctgggagcaagtagcaagaacttggccttatagctgtgttttagtccattctcatactgctaataaagacatactcgagactggataatttataaaagaaagaggtttaattgactcacagttctgcagggctggggaggcctcaagaaatttacaatcatggcagaaagggaaggaaacatgtccttcttcacatgatggcaggaaggagaagtgccaagcgaaaggggaaaagccccttataaaatcatcagatctcctgagaattcactcactatcacgagaacagcatgagggtaaccacgcccatgattaaattacccttcactgggtccctcccatgacacttaggaattatggaaactacaattcaaggtgacatttgggtgggaacatagaactaaaccatatcaagctgttctggaataaatataggtgacaatgtactacttgcaattttttgaaatgggggccagtcttgtgagtctgagcactaaatctgtgggatccaacactatcttcaggtagagaatagaatagaataagtagcagtacgtgcaactagtgtccactggagaattacttgctggtgggaagaatccccccaccgcaccgcccccgccacacacacactttttggtgatcagaggtgaagtattcagtgttctgtgttgactgtgtaagagaagaaaaaacactttgtttctttcctaccatatctctcaggatgtgtgccatttccacaccacctttcctgaggctgcctggtgggcttccctgtaccaacaacctgtgaaattgaaaacttcagcctctctgaggatttgagccccacacaggagatcacaggaaagctgggtgtccagcaacattgacatgaactctgttcattggtcattctgagctggaagcgagtggcattggaaaagagatgatgatttataatatctgaataatgcagtggtgtttgcttcctggctagagtctccttggtaaggctcttagagcaggttcctctgccataagacatacagaaatgcaagctcaattacattgcataacctctctagaaggggggaagaatggtcatccaatgatgaagacaatatttcttaattccctgatccatctcttagataaacatgaaattcatggcagtaaagtgaaattctacagaaagagggtggctggtaaccgtgcctggataattaggttttgctagaaggcaacactcaagtttgtatctggaaattgcccctgaaggtcagacatggagagggacaggggtagcaaggatgaacaaatacccagaccttgggggaaagagggtccagagtcccaacaaggccatgaccactctgcacctgctgctgcaatctctgtccacatcagaagtgatagaacttctcccttaccaattatccagattaatcaagttaaaaatacccacttatccaatagtgaagccagaactttggaagatttgacttgtctgcctaattgcctcaagtctcttctcccaactcctctgtaaatacaatcttccagtttcactttgaaagatctcactacatcagcaatgcacatcatttcacgtctttccctcttcattttgttccattcaacaccatctcttttctcaacactatcacatactcactgaaacactattttctatcactgagcacaaaatagtgtattaaggacattgtcacacattcagatgaaagggctgagttctcagatctctaaacctagagtgggcgcctggacagcaataacaagctttccaggaaactctagtgtagtcctcacaccagaagcacttggtgtccttagggaactagctaaaaatgcagaatctcagatcccattgcagatgtcctgaagagcatctgtagtttaccaagattccacgtgattctcacgtgcatcatcacccttgagaagccctgctgtaccacactgcaaggattgagaggagctgagggttagggaatctgggattagaacatgctttgccacagtgaggtatatctcctgagccatttgacctttgaggacattcatcttctcacctgccaatggaggtgcacagactgctagataaatagtccccaaactttgctggtcagtcatctgtggcatttaagtagctttctaaaaatacatattattgggcccctcccctgggaattatggctccatagtgtctgaaatgctgataggtttgactattgctagtctagctactgtgcatatttctgaaattcaaagagacctaggttcaaacacagctcagacacagtacagccatgtagtcttgggcaagtaattaactgctttgagactcagtttcttcatcctgtaaatggaaataatattatcaactccctggagtttgaactactaaatagtttctgtaatttatgtaacttagcacataaacaaaatacatttcatgactttttctcttgtttctgtgaactcctgccacccctccctttccttggctgccttcccagcagatggagaagatttccctccaaaggcctctgcagctgctgcactccctctgaactcttcttccaaaaagtgcttgtgtccccatctccttcatgtctctgtctggaagttatcaccagggaggctgtcgcagactgccacatggaatatcacaaatattccccaccccagcctcctaatcttgcctatgtttttatcaggggacttcacaccacgtgacattatactgtatatgtactcgtgtatttgtttattgtctgacacccaccccatcctacccaccgcctccagcctggccactagaatgtaagctccacgagagcaagaactatgcttagttcatggcttaatctctaatgtctggaatatggcctggtacaaaacagcggctctacaattatttgttaagtaaaagaatgaataaataaaagtttccattaatcaaatatctctacttttattagttattcttgttttgatggtcctcgccttaacaaactactttttatctgggaaaatgggcaaatcattgatgctttctcggggtttttcaaattaacgccacgcagagtaagcccctctattgattaacaataaattaaacatatgacttgggatctgcaatatttttttctttacttcttttcacacaattaaaaaatgagtaaactccctgataaaagattcaaacaattaagaagtgtgttatatgtacaagatgtgaaagtagctcctactcatgactaccctcttctcattcccttccccagaggaaagcatggttagcaattaatgctacatcttaatgttacagtttctgtgtagttatgcatacagaggtgtgtatatacatatcgatcttttttatttacctaaatggcaaaatatgcttattattttttaactttttcatgaaatagacctattcatgtctatatggatctgccacattctttttatgggctacataaaaagatacatcataatttatttaaatgctcccccttgtgacaggcatttaggttgtttccagtttctctctattagcacattgccatgatcgtccttctacacacatttggtcataatacaagaatttctaaggaaaagattcttagaaatactcattaaaatgtagtgaaggctacccaattggtctacactgagcttcctaactttcactctccgctagggtacctgagaatgaccctttccttattcacaacaaagccacatgttatttatctccttgaattttaccaatttcattctgtaaaatatctccttatagtaatttgcaatgaattgatttctagtgaaatcaatcatcctttttatttttattatccacttgtatttttttactgtatatttcctgtttatttaatcaatttttcgattggacttttttttacattttcttatattattttcttagaattctatgttattttgtgtatagcatcttttttcttacagatattatgaatattttcttccagactgatatgtttcttttaaattcatttatgaatctctttcactgtaataagttttttgacattgccaaatctgtcagctgcttttataacttctgcactttgagtcttaattacaaagttattcccaaactcacacttatacaaatatcttatatactttttaatgctttttcatttttatgtttaactctttttggaattcactttgaagtcttccagatgcgttttaaaaataaaaccaagttctttattttgcatgattaacctatacctatctttaaagttgagaaactaaaagggatcataggctaattgacacgtattcagctcactgcttcacattcctgtctttttcattcttgtgaattaggaatcatttgatgcagagctccaccaatgcacacctatatagagaaataaattctgatcttaagtaggccaactccccttcctaccagggccatcctccctttcagactcatgtggaatgtctcctgatagaagacaatggcacagggaggctccatgggagcaagtctgaatgattctgtatgagacataaagcttgtttaggccgcgcacggtggctcacgcctgtcatcccagcactttgggaggccgaggcgggcggatcacgaggtcaggagatcgagaccatgatgaaaccccgtctctactaaaaatacaaaaaaaaaaaaaaaaaatagccaggtgtggtggcgggcgcctgtagtcccagctactcaggaggctgaggcaggagaatggcgtgaacccgcgaggcggagcttgcagtgagccgagatcacgccactgcactccagcctgggcgacacagcgagactccgtctcggaaaaaaaaaaaaaagcttgcttcaatcctggtcaatgtttgttggaacgaaaaaacagcttttaagagaaacgcatggaaagaaccagttaatactttggactgaatcagcaagatagaaacagctagcctgggcagtccaagattttctttcttccttgatgtctctgagcacatataaaagctggtgtaggatgtgcctccagccgaggagttgtagggtttgcctggatatagataaatctgctccctaatcaggaccccaataagcattcggggctggagcctcgggtccgtgtcattaaaatgtggttggtacacattcatccattttggatcagatattgcacaaaagaaactgaggcaggtaattttaattatgcatgcacttatgtgtatttttatagagatttattataatgctgtggcttcaaatttgaaaaaagaaggaaagaaaaaggccacctaatatcttttcctttgtggagggagaggggtttccacagaacaacaaaaaggaacagataagaccattctaggctgagaagtgtaaaactaaaggataataaaatcgagctgatgcagtttaaagactcctcattacctggcctgagatacggcacccattgttgctagtggctggagattatttctcagcctgctgcaggctgataacagactcgtccactggcctgaaggctcattgttctgcaggcaggaatgacgccttggacagaagccgagtccctgtgcagccctgctcctctagccttccgtctcccttcagtgggattacaaaggaaagcaagagttcccgtcacctgagaggtgctctgggactttttcaatcctccctcctcacactccagttacctaatttgggtcaggtagttctgaaaataaaatgctgaagttttcttttcctgcagaacaatgtcacattagtcaacttaaaaagactgctcacagcacaaattgtctgtacaactcattttgccccttaattatattccaccttgttttattatttaaaggcatcatgtgagttaagtgtttatagatgtttaaaatgtaagagttggaagtggatctggagatgcagtttaatgctgtcatttaaaaggctggcacaccaacgcccagatgccatgagggtatgctcactggagaatactgagtgcggaaatgaactttctcctccctctccccaaggcagcactgtgagaaaggggtttctgggtcagaaggaaagggagcctcacatgttactacaagaattgtggagatcacagcctctcacaaatcttagtgataatggtctatgaaaccaaatgagaatcaaagattctgaattcaaagttcagagtcttccagccactattcaagctgcattcaaaagccaggagagctgacaactccagggcaaagtgtttggtgtcacggtgaacagcaaggttgaatagatgcgttcaaggaggctgttgacatccctctagcttctgatctccacgctgacaaacctacagtgtgtccctaatcttgtgacctacaggttgaaaggaaggcgtactccttcatttggacaaagctaatcttcctatctgggcttccaacccagcctccctctctttctgcttagcctttactcatgcttcagctcttgttgatctctaaactgctcactctcctctggctctttttcttcaacctatgtgaatggccagtgctttcctatcattagaaacaactccttacattgtaaatgcccctgtagccaaagtacacctctccttccctctgcaggcaaactaattataaaagcatgcacactttctatccatacccccatcctttctcaagatacctatcagtggaaattcaatcctgaacaactagtgcctttttgcataaaatgttagttgttttcatttttcatagagttgtatggattgtagaggtttgtgatctgcactcgttatgttgctttttaaaacgatttctaaaaatcttgttacagtaatacctaacacttgtaattgttatactgcagctacaaaaataattatttaaatcaatgttaaaaatctttagccttttttaaaaaaattgattctttcagaaaacatcccaagtattccaaatgagtattgattgaggtagtttcaggttaatgtatctgccaaaacattactttattgttctaaacaagtaattaagagagcattttagattacataacgctctgtgaggactttaaggtaaagcagctctacctctttctggaagctcattttagggaaaagtctcaaactaaattaggtcatttatggtaaacgctggtggatctcaaaactacatatacctcccagaactctcctgcactctaaaatcatggatctcatccatactgatccaatcacacccagatatcccacaggcactccacactcaacatgtctagaattatgctcattgcctcacctccaattatcttgccttctgtatgttattgaaagtaaccactacccaaaccagttagtaagagctctagaaatattcttggacaactgcttttgtcttttctgaattttattcattagacaaatgtgttgaacaccttctctgttctgagctgttttaagtgccaagaattcatcaatcaataaaagatgtaagatacatgtccttatgaaatttatagtctagtgagggagttggaagcaaaaagaaaataagagggaaaagataggaaaataaaaacaaaatcacaatttaaaagtgaaacaaggtgatgctttagagaataactgggtgcgacatggagagaattttcgtgagactagagcagagcaagcacagggcagggctcacacatgtgtgggtgtgagagagtgtatgtgagtctggggtgtgtttgtgtgtgggggtgcgtgtgtatgtgtgtatgtgtgtgtgaatgtatgtgtgtgtgtggtgcctgtgtgcctgtgtgtgtgtggtgactgtgtgtgtatgtatgtgtgtgtatgtgtgtggggtgtgtgtgtatgtatgtgtgtggggtgtgtgtgtgtatctgtgtgtgtgtatatgtgtatggatgtatgtgtatgtgtataggcatgtgtgtatgtgtgtggggtgtgtgtgtatgtgtgtgggggtgtatgtgtgtgggggtgtatgtgtgtgtatatgtgtgggggtgtatgtgtgtgtatgtgtggaggggagtgagtgtgtgtgtatgtgtgtgtatgtgtggaggggtgtgagtgtgtgtgtatgtgtggaggggtgtgtgtgtggaggggtgtgtgtgtgtttgtgtggtgtgtgtatgtgtgtggggggctgtatgtgtgtgtatgtatgtgtgggggtgtgtatgtgtgggaggtgtgtgtgtgtaggtatgtgtctgtatatgtgtgtatgtgtgtggggggagtgtgtgagtgtgtgtgtacgtgtatgtgtgtttgtggtgggggatggtagtggtcataagaagaagccaaacaggtagtttaaggcccagtcctgcaagagatgtttgaatttcatgcaaagtgctctcagacaacatttcaggattttgaccttgcaagtgatgtgacatgatctgactttgtttttaaaagatgactactgaatagagaacacattgttgcagaagggatgcaaaaatggaagcatggagggtgcagagggcatgtttgtagttaaggcaggaagcaccagtggctaggatgttggcaacagtacaggagagggagagacaaggaaagatttgggatgagttctgggggtaaggaccccagggcttcctactagatcagctattcaaaatgaaggaaggtgaagaattaagaatgacacctagatttttttctatgtgctacaatgagatggatagccgtgtcagtcactgagactgagtgaattagggcagaaactatgtaaggttcacaggaaaatgcaggattctgctttggacttaaatttgagatatctactagacactcaatagagatgcccagtagacagatttgacacgtatgtgagcatgaacgcatgaatgtgtttgaagtttgaggaatatcagtagcaatagtaaaagcagtaataatagcagcagtggaagccactcatgtctgttgagtaccccttaagtgtgatcatagatatcattagcatcctaactacagaaatgaggaaactgagattaagtaaatggcccaaggtcatccagttaccaagtgacagagctaggattgaaacccagattgtctggttcccatgttcatgctcttaaccattctactaaatatgaatttgtgagtcagcatcatatcgctgatgtgtaaagccagaagaccagttaggattatttattaaaaagtagagacagaagaaaaggcgttctaggacctgactcttcaataagccaacacttaggaattaagaagaaaaaggagaacctcagatagaactgaaaacaagtttcttggaggcaggaaagaacccatgacaatgtgaggtcctagaagtcaagaaaagtggttcgaaaagaagctcatgagcaaccgtttccagttaaatgagcatcaaaaaatgatcgatgaatttggtaacgcattattcaatacagcccttgataaagtttcagccgagtggtaagttgcttgagaaaaggaagaaaggtgaggccaaaaaacacagctgggaggagggggtttgatggcaggtgaggcactttgtctacatggcaggggatggctgtggatggtggggcacagccttctagtcatctgctcttcaggtactgctcctgttctcctcttgactcagttatctattaattatctattgctgcataccccaggcttagtagtttaaaacaacagtaatcatttgttgtctctcatggtgtctgtgggtcagggatttggaatgccttggttgactgtttctgtctcagtgttataaggttgtggccaaatgccagctggggctgcaaccatcagaaagtttgcttggggctggaggacctgattcaagttggctcactctcgcaactggaaattggttcctccatctgtgggtgtctccagagggctgcctaattatcctcacaacaaaagaccaagacagaagctgcaacgctgtaaatgaactagtgtcagaggaaatgacacaaggccatgcattccaggagttgagaatcattcatgaccatcttggaggctgtcaaccacacccactctttattgagcaactcctaattttattaaggatagccacggacctagctaaatacactcaacaatctaggctctcttgtagctcaagagcccatcccattcaatgagaactccagcccacattgaaagcaggctcagctgacatgtgcctcttttccatttgccttcactttccctcaccctcttttccttgtctgaaacacagacacggtggaggagtagcagcaggcctacatcatgaaggcaaaactcatttgctaaagatggttctggaaggccctcccttttcctggtgaacaaatattccacattcaacactcagcttgggggtgcttcttcagtcgtcttcctgacaaatatgtaataaccaacatacatacatgtcacataaagggaatatccctacctttttaaatacttctctgcacttggtgaaagtcattgcaacatgtgtttttgtttggagttctagcttccattattagactctaagacctttgaaggcaaagacagtatctcatttgtctctgtatcaccagagcctagcacatagtaagcactccacaaaaatctgctaaatgtgcaaatggttctagtttgtgtctattcaggagagagccgagggttaacacaatccatttctggcaggcttatccatccctgtaaaagcctacggaaggctcattatgaaggacaatgttctgtaatgaagtcttcttgcatatctttggtaataatcatcatagagggagaaaatgagcatctctctgtaatatttatatttcctagcagcaaagacattctcttctgtaattctgcctgtaaaagcagcaaggaagccaagaatatacaagttctccatggtaactgggtcacagtagcttgcagcttggccagggcttcagataaatggaataaatggaggtgagcttccagcagcaggaactgtgtgggagagtggagcttgcactgaacaatctctccccactgggacccacagtccccagcacaagtgctctgtgcatcgtcactgcagggggcagtggaagcatggcctgatggcatttgtatctttctcactacctcacagtgctgcgctgacatctcagtttcatcaaatcaacaggccactttttaaaaatgcctcgtatgctctgaatgttaacccaagaaggagattttaccccaaaccaccaggggattctttctatgtatccttaggctcttagatcatttctctcaactgcaaactagcgagccagctcccttcactaggcttggaagaggaaccatattaagcatctggttagagagaacagctgtttaatgcacggcaatgaaaaattctcattcaaatcagtcaactcttccattaaggacaaggggtgccaaacagcaaatgccaagtgaatgacctttggcaaagccattcccaggggcagattcccagccaatgtgcagctttgtgaaaacttgtgaaaataaatttgtgaatgtgtgaaaattcatgaaaaggaagaaaatcaattgaaggacagaaaaagagccctcgagctactgtggacacagaaactacctcttctggatgctactcccttatggggaaagacccaatctgtaagtgaggcagccctaccaattccacaaatatgaaagagtgatcactaaggaaacctaactaggtcaaggatccatttccctccctattggtgcagggcatgaaataatgaaactgacaaggagactgcatttttcagagtaggtgcttctccactatcactggagccaaaattcataattgcagtagctcatgcctataatctcagcactttgggaggccgaggtgggaaaatcacttaagcctgggagttcgagaccagcctgtgcaacatggctggattctgtctctacaaaaaatttttaaaatagtagggcatagtggtgtgcacctgtggtcccagctactcagaagaatgaggctggacaatcacttgagcccaggagatcgaggctgcagtgagccaagatcatgtcactgcactccagccttggtgacagagtgaaactctgtcacacaaaaaaatcataatccataactacgtaaaggaatggctttacataaggcccaaaagtcatggcacagatgaaaatccaaacagaacactgtatttgtagagaaattaacagcactctctacaatctaaggccaattacctgcaggagccatcagtgaacttgccaggcctcaggtatgtagctgagccatccctggaacacgtagcaggaaggatgggagagatgaaggacttcagctgatggagaggagcctgctcgggcctgtgggaggggacgactggcctacatttaccagcagacagacccaacatgcagcagcaatcatattcataaaatcataatcacagagtcagaaacattagtgatagagagagatggattgggtcaggtagcctgcctcctgcctttgtagctttgctccccaggtcaattccttggcccagtttttaccctgtttataatttgcaaggagaagctaccagaacagaatgctttctggaatctgttgtcaaggagagagtaaattaagaggaattggacctcttcacataggagcgaaaagagcccaggggatatggaaaagcaggaagatgaaacaataggcatttctcagtgaccctgtggcctgtcctcttcagtccttgctggccccagatgtgataggtagcaaagacatgcaccctttgcatctgcccagctcagcctcacattctcccttatcaagattgaatgtgttctcagaatctcaggcctcactatttggaggaaccagaaatttttctgcagtggcccccaaatggctggccactgcggaaaacttctagcctcccttcctgaacagattgttgctatccatcattcatatagctggtcttctgtctcagttccctgtttatgctcctgtcctcaccagggtggagcaccaccctgaaccagcatatgttattggaaccaggacacatatctggttcctgtgggcctgtcttccaaagtcgtggattgcagtcactatggtgtaaaacgcctagtcatacctggcacctcaactgtgtggccacctgatgaaaggcataatcccctggtcacaaaataactgtcccccttgggttctagcaccctctttcttagccacagctgccatgttctctccattaccattactggaaatactgctcccacctgccatactgctagttatttcaccagccctaggtttctgtgctttcttcttcccttctctccaccagccctgaggtccctgcctgagtcacaacagattccactggagagaagcaaaggttgggttttggagagttctttatgaaagccctccaaatacataagcccccactaagacctatgaaggcctgagggctggcctaaatctccagttattagataggcttgcttctcctcttctcctattgcatttttcttaagtgagtcagtgagtgtacagaaacaaaggagttattcggagcgattttaaaatgtgtgctatacatggaactctgaagagctgcttcaagaaattcattaacctcttgctatgggctgaactgtaactgtgccccacccccattctaacctccagcatctcagaatatgactgtttggagacagggtctttaagggggtgattaagttacaatgaggccattagggtgggccaaatccaatctgactgatgtccttattagatgagattaggacacacaaagagacaccagagatgcaggagcacagagaaaagaacatgtgaagaggctgcaagagggcagccatctgcaagttaaagagatatctcaaagaaaaccaggcctgcatgcgccttgcacttgaacttccagcctccagaaacgtgaaaaaaaaaaatatttctgttgtttaagctacccattatgtaatattttcttatgacagcctgcccaaactaataatacacctcctttcagcacagaaaactcatgtaacatgcagtattttgccaaacattgtatggctattgaattcaaatgtacgttacatatgaacaggtatatatacagatatttcatctgtatacatttatgatagagtgacacacagacaaatccatctgtgtgaccctgtgcaagtaacctaacctcttttcgccccagttttctcatctgtgaaatggagatgctaagagtatctacctcaaatggttattgtgaagatgtgtagaatccttaaaagtacttgacgctatcagcactatgtaagatacatatacacactctcatgtttttagcatgtacactatatttacatgcaaatttcaaatcaaagagccatactcttgaagttcaaaaaatcttagaaatcatatagcttttctcagcattaagccacctttaaaaaagtgctacttcccttttacactgttggtgggactgtaaactagttcaaccactgtggaagtcagtgtggcgattcctcagggatctagaactagaaataccatttgacccagccatcccattactgggtatatacccaaaggactataaatcatgctgctataaagacacatgcacacgtatgtttattgcggcactattcacaatagcaaagacttggaaccaacccaaatgtccaacaatgatagactggattaagaaaatgtggcacatatataccatggaatactatgcggccataaaaaaggatgagttcatgtcctttgtagggacatggatgaagctggaaaccatcattctcagcaaactatcacaaggacaaaaacccaaacaccgcatgttctcactcataggtgggaattgaacaatgagaactcatggacacaggaatgagaacatcacacacaggggactgttttggggtggagggagcagggatggatagcattacgagatataccaaatgctaaatgacgagttaatgggtgcagcacaccaacatggcacatgtatacatatgtaacaaacctgcatgttgtgcacatgtaccctaaaatttaaagtataataataaaaaaattaaaaaaaattaaaaaaagtgttacttccatgaatcccattgtttgaaatattttatctactaaacaaattgcatttgttttcccaatttttaaaattgaatgcaagtgtccttttaatctgagtatccattatgctgaattaatatgatttttgtcaaaaataggtaaattgaccacttatctttgggcttttataagatttttaaacactggcaataatacatggactctcatgttcaccctgtggttcccaggtttcccaggttggagaccacagataacagagtgcaacccaatgattttcaaatgaggactcagagccagagtgagttgcccaagatggctcttgaagccaagtccccatacacccatctcaagctccctggcccacaacacattcctggctgcacattcttttccccagttagcctgtgctgcaccaggtagttccagaagtacacagggattagagccacagagaatccactcttcctgcacagtggtacagacgtctcctttcatctcagactgagacaggtagtagcacactggggatgaggacttcaggaaagagggaagaggttatcagtccagccgaacttggagtgagatgcttcttggagtgggaagccttctggggctaggcataccttctgtgttggaagcaactgtcattctggaaagcttggaacagtcaagatatggctaagagaagagggcaaagctgtccctgtttttaaatgtaagattgagagaggagagcactcttaacctccaacatgaggaatggaggcaaagttcaagacagaagcaaattcatcgggaatgaacatatgtttttctggagtgtgtgctgtgtttttattctcaggtgctgtgtattgtaggtgtaatgcccaaagacagggaacatagactgatgtattaaggtaatcattgactttaggaaagagtattacctgtctacttattttttattttcattataaaatctcttggggtgcatagagtaatttacttgtaaagattttgatttacagatgaagaccctttgaaaacatatctaaaagggaaatactttatcaaatgtatgcatatatttctgagataatagcaaatagaattgcttattcatttttaaatatatggagggttttcaagtaaaataatggaaggtatttaaagttgaagacaattagcaagttagaaattcagcaagtttgcagaatatactcacatgtaaagtaaaagattaactatgctaaaatgaaggtcaaggcatgtgaaatgatataatacagtatataataaatttggctgtattcaaatagacttagaatcaaataccaattgttctaagtttaaactgtgttcttccataatttacatacattttctaaatctcaatttttcaagcttaaaataggttaaaataccatttctaactataagatagggaatgattcaatgaaacagtgcaaaggaaagtacagagaatagagtggctggcacacagtaggtgcttaataagtgcagtgtatgatgatggtgaggaagaggaagatgagaaagatgaagaacaggaagacaagtgaagagacagataacgggatacacaacacatccttaacatgagccccccaaagagtcattcacatcaaagatcttcttgttctaagcaaaaatctaacagcaacattgggggaataaagtccttaaaaatagaaaacaaaaatacagatgttctaaactcaacagtgaacatggtgagtgaatcctttccacttaccatttaatgacttgttaaataatagttgataactgttgtctttatcatcaagataatactgcttgagcctagtaaagttcttaagtttgtttgtggtcattctttggcttctaagattaactggttttgatttacagttgcgcttattacccatggttgcttcaagaggctgaagaaaggctgcatccaccagtgaagaagcaaaacgtatgctgagaccaagagaatataatttgggttaaatataaaagtcagtgattatcctaattgaaaaataaaggactactcatcagctgaacatgtatcaaatgttcaggcatttttttttcacaaggagatagagcacatcaaaacaaaatgcacagaattagttcttaatagggagaggagccaagatggccgaataggaacagccctggtctacagctcccagcctgagtgacgcagaagacgggtgatttctgcatttccatctgaggtaacgggttcatcacacaagggagtgccagacagtgggctcaggtcagtgggtgcatgagccaaaaaagggcgaggcattgcctcactcaggaagtgcaaggggtcagggagttccctttcctagtcaaagaaaggggtgacagacggcacctggaaaatcgggtcactcccacccaaatactgcgcttttccgacgggcttaaaaaacggatcaccaggatattatatcccacacgtggctcggagggtcctatgcccacggaatctcgctgattgctagcacagcagtctgagctcaaactgcaaggcagcagcgaggctggggaaggggcgcccaccattgcccaggcttgcttaggtaaacaaagcagccagaaagctcgaactgggtggagcccaccacagctcaaggaggcctgcctgcctctgtaggctccacctctgggggcagggcacagacaaacaaaaagacagcagtaacctctgcagacttaaatgtccctgtctgacagctttgaagagagcagtggttctcccagtacgcagctggagatctgagaacaggcagactgcctcctcaagtgggtccctgacccctgacccccaagcagcctaactgggaggcaccccccagcaggggcagactgacacctcacagggccgggtactccaacagacctgcagctgagggtcctgttagaaggaaaactaacaaacagaaaggacatccgcacaaaaaacccatctgtacatcaccatcatcaaagaccaaaagcagataaaacacaaagatggggaaaaaaacagcggaaaaactggaaactctaaaaagcagagcgcctctcctcctccaaaggaacgcagtccctcaccagcaatggaacaaagctggacggagaatgactttgacgagctgagagaagaaggcttcagacgatcaaattactctgagctacaggaggacattcaaaccaaaggcaaagaagttgaaaactttgaaaaaaatttagaagaatgtataactagaataaccaatacagagaagtgcttaaaggagctgatggagctgaaaaccaaggcttgagaactacatgaagaatgcagaagcctcaggagccgatgcaatcaactggtagaaaggatatcagtgatggaagatgaaatgaatgaaatgaagcaagaagggaagtttagagaaaaaagaataaaaagaaacgagtaaagccttgaagaaatatgggactatgtgaaaagaccaaatctacgtctgattggtgtacctgaaagtgatggggagaatggaaccaagttggaaaacactatgcaggatattctccaggagaacttccccaatctagcaaggcaggccaacattcagattcaggaaatacagagaacaccacaaagatactccttgagaagagcaactccaagacacataattgtcagattcaccaaagttgaaatggaggaaaaaatgttaagggcagccagagagaaaggtcgggttaccctcaaagggaagcccatcagactaacagcggatctcttggcaataactctacaagccagaagagagtggggaccaatattcaacattcttaaagaaaagaattttcaacccagaatttcatatccagccaaactaagcttcataagtgaaggacaaataaaatactttacagagaagcaaatgctgagagattttgtcaccaccagccctgccctaaaagagctcctgaatgaagcgctaaacatggaaaggaacaaccgctaccagccactgcaaaatcatgccaaaatgtaaagaccatcgagactaggaagaaactgcatgaaataatgagcaaaataaccagctaacatcataacgacaggatcaaattcacaatttgatattaattattaactttaaatattaactttaaatgtaaatgttacatttaaacaatattaactttaaatgtaaatggactaaatgctccaattaaaagacacaaactgacaaattggataaagagtcaagacccatcagtgtgctgtattcaggaaacctatctcatgtgcagagacacacataggctcaaaataaagggatggaggaagatctaccaagcaaatggaaaacaaaggcaggggttgcaatcctagtctctgataaaacagactttaaaccaacaaagatcaaaagagacaaagaaggccattacataatgataaagggatcaattcaacaagaagagctaactatcctaaatatatatgcacccaatacaggagcacccagattcataaagcaagtcctgagtgacctacaaagagacttagactcccacacattaataatgggagactttaacaccccactgtcaacattagacagatgaacgagacagaaagtcaacaaggatacccaggaattgaactcagctctgcaccaagtggacctaatagacatctacagaactctccaccccaaatcaacagaatatacatttttttcagcaccacaccacacctattccaaagttgaccacatagttggaagtaaagctctcctcagcaaatgtaaaagaacagaaattataacaaactatctctcagaccacagtgcaatcaaactagaactcaggattaagaatctcactcaaaaccactcaactacatggaaactgaacaacccgctcctgaatgactactgggtacataacgaaatgaaggcagaaataaagatgttctttgaaaccaacaagaacaaagacacaacataccagaatctctgggacgcattcaaagcagtgtgtagagggaaatttatagcactaaatgcccacaagagaaagcaggaaagatccaaaattgacaccctaacatcacaattaaaagaactagaaaagcaagagcaaacacattcaaaagctaacagaaggcaagaaataactaaaatcagagcagaactgaaggaaatagagacacaaaaaacccttcaaaaaattaatgaatccaggagctggttttttgaaaggatcaacaaaattgatagactgctagcaagactaataaagaaaaaaagagagaagaatcaaatagacgcaataaaaaatgataaaggggatatcaccacctatcccacagaaatacaaactaccatcagagaatactacaaacacctctatgcaaataaactagaaaatctagaagaaatggataaattccttgacacatacactctcccaagactaaaccaggaagaagttgaatctcagaatagaccaataacaggatctgaaattgtggcaataatcaatagcttaccaaccaaaaagagtccaggaccagatggattcacagccgaattctaccagagatacaaggaggaactggtaccattccttctgaaattattctaatcaatagaaaaagagggaatcatccctaactcattttatgagtccagcatcattctgataccaaagctgggcagagacacaaccaaaaaagagaattttagaccaatatccttgatgaacattgatgcaaaatcctcaataaaatactggcacaccgaatccagcagcacatcaaaaagcttatccaccatgatgaagtgggcttcatccctgggatgcaaggctggttcaatatacacaaatcaataaatgtaatccagcatataaacagagccaaagacaaaaaccacatgattatctcaatagatgcagaaaaggcctttgacaaaattcaacaacctttcatgctaaaaactctcaataaattaggtattgatgggacatatttcaaaataataagagctatctatgacaaacccacagccaatatcatactgaatgggcaaaaactggaagcattccctttgaaaactggcacaagacagggatgccctctctcaccactcctattcaacatagtgttggaagttctggccagggcaatcaggcaggagaaggaaataaagggtattcaattaggaaaagaggaagtcaaattgtccctgtttgcagatgacatgactgtatatctagaaaaccccattgtctcagcccaaaatctccttaagctgataagcaacttcagcaaagtctcagggtacaaaatcaatgtgcaaaaatcacaagcattcctatacaccaacaacagacaaacagccaaatcatgagtgaactcccattcacaattgcttgaaagagaataaaatacctaggaatccaatttacaagggatgtgaaggacctcttcaaggagaactacaaaccactgctcaatgaaatcaaagaggatacaaacaaatggaagaacattccatgctcgtgggtaggaagaatcaatatcatgaaaatggccatactgcccaaggtaatttacagattcaatgccgtccccatcaagctaccaatgcctttcttcacagaattggaaaaaactactttaaagttcatatggaaccaaaaaagagcccgcatcgccaagtcagtcctaagccaaaagaacaaagctggaggcatcacattacctgacttcaaactatactacaaggctacagtaaccaaaacagcatggtactggtaccaaaacagagatatagatcaatggaacagaacagagccctcagaaataatgccacatatctacaactatctgatctttgacaaacctgacaaaaacaagcaatggggaaaggattccctatttaataaatggtgctgggaaaactggctagccatatgtagaaagctgaaactggatcccttccttacaccttatacaaaaatcaattcaagatggattaaagacttaaatgttagacctaaaaccataaaaaccctaaaagaaaacctaggctttaccgttcaggacataggcatgggcaaggacttcatgtctaaaacaccaaaagcaatggcaacaaaagccaaaattgacaaatgggacctaattaaactaaagagcttctgcacagcaaaagaaactaccttcagagtgaacaggcaacctacagaatgggaggaaatttttgcaacctactcatctgacaaagggctaatatccagaatctacaatgaactccaacaaatttacaagaaaaaaacacacaactccatcaaaaagtgggcaaaggacatgaacagacacttctcaaaagaagacatttatgcagccaaaaaacacatgaaaaaatgctcaccatcactggccatcagataaatgcaaatcaaaaccacaatgagataccatctcacaccagttagaatggcaatcattaaaaagtcaggaaacaacaggtgctggagagcttgtggagaaataggaacacttttacactgttggtgggactgtaaactagttcaaccactgtggaagtcagtgtggcaattcctcagggatctagaactagcaataccatttgacccagccatcccattactgggtatatacccaaaggactataaatcatgctgctataaagacacatgcacacctatgtttattgcggcattattcacaatagcaaagacttggaaccaagccaaatgtccaacaacgatagactggattaagaaaatgtggcacatatacaccatggaatactatgcagccataaaaaatgatgagttcatgtcctttgtagggacatggatgaaactggaaatcatcattctcagtaaactatcgcaagaacaaaaaaccaaacgctgcatattctcactcataggtgggaattgaacaatgagaacacatggacacaggaaggggaacatcacactctggggcctgttgtggggtgcgaggagggcagagggatagcattgggagatatacctaatgctagatgacgagttagtgggtgcagcacaccagcatggcacatgtatacatatgtaactaacctgcacattgtgcacatgtaccctaaaacttaaagtataataataaaaaaataataataataaaataaaataaaaaagaattagttcttaatatcactgttcgggagagctgtccaaactgacctaagaattagtgtctaggtattaaaaattttcattccaaatgatgaaagggaacactgtcccccgactcatgacaagcaagttactttgtattgcatgcatttacctcataaataagtgtttatgacagtccaggactggggcaggagctaacaggtctcacagtgctgtaggagagagggggttccaattcacggttctttgtgttttttgtttgtttgtttgtttgttttgagttataatttacatacaaccaaaagcacagaccttaagtgtttagtttgatgtgttttggcaagcgtgaacactcaagtagctacctcccagttaagaaatagcatgtttcctttctcccacagaactccttcaggactggtccagtcaattcccccaccatgtggctcctgccaccccatgtcaaggcagccactgatcaatttctcctactatgacttagcgttgactgctttagaactttacattaatggaatcatatactatgtaatcttttgtggctggcttcttttgcttaacctaatttgtttattttgaagtttatccatgttgtatataaaactgcgtattttctttttattgctgagtaatattccatggatgaatacagcatcatttgtgtacccaatcttccaatggtagtccatgtaccctgtttccctgtataactattataaataaaacattcttgtacaaatctttttgtggacagatccactcatttctcttaaataaatacctaggagtggaattgcagtgccacagtataggtgtgtggctagcctctgaagaaagtgtcagttttccaaagtgctcaccctgttttaaactctctgcagtgattatcaacttacaggagttccagttgccctgcctctttgtcaacacttagtattgtcagtcacatttattttagccattgtagtgtgagtcaaggattccaattgccttaatactcataaaagcttggtcctcaaatctttatactgcagtgaaaatgactctcctcatgtctcatacaattgtgtgggtggccccagtgctgtggggattctgcagagggtttcctcaaccaactgttgacagcatacgtgtcacccagcatgaaggagtgatgcacctatcttagggttagtcatttgtgagccccacaatggttctttgatgatagtaagaatgtgccaccaaggttttggtgaattgagaggacagggaagggacctgacaaatgcaatttcttcattgttaaaaaaaatgcattttgaacttcagaacagttttttttaaaccatacttttataatctttttagaaaatgattccctgctcaaataagtttggaatattttcctctctcggtgcttgctaggcacattgacccattcaaaccccaccaaaatcctgcagtaaggaacatatttacttttatttaagccattgtctcataaatttatttttctgggattccttttcttttttaattttcctttctttcttttctttttttctttattcctttctttctttcctttttttctctttttttacacatcatctatcaatatcctttcctcacaacatattttgggaaatgttggtataaaacggatggctagcctaaagtcagcattcttggtttcaatcagtttagcaaagcttaaccaaggagagcctgtgaaacaaacatattttgaagcaattaaaatttgggtggtaactcattcttttcttatttacaacaagcccactggaaagaggccaagagcaattcaatgcttattgcatctcattgcatattattggtacttagtaaacattaattattagtgggtagttgaataaatgataatggtaataaggatcatgataatgctgtattttcaactttgccataaaccaaaacatttgagaaaaatcttgagacagcttgtaaaacccaaacacagctgggctctctcatctccagtgaggatttttcaccctgaaacaaacaacagttgctacataaagaaaaacaggttgactcgggtcactgagagacggttactcagcccatcatgtacaatgacaaatccacctgtcagaattttctaaaatgtgcccatgacgggcaacgtctcttctgtccctttaggaatttccaacatgtcactgcctcattgcctcccgggtcctataggatcaagtccctgctgacctgggccatcatctgctataatctccaacatacccatgggccaacccacttttcttcatttatctgttcccacagtcattcaacaagcatttattgggagcaaattgctgatgaggccctggactacagtaacggtgagcagcaaatgtgcctcctctcttcatgcagcctgctgtttgctgcacgaacacctcattcttgcttttctcgtgatgcttcccttagtagactctcctctcccttcctctttgctactatgaatgacactttcccgttaggacccagcttggggttttcctcctccaggaaatattccctgatcttattacctggccagatagagtcacagaaatgctttgagttggaagatatctcagcaagcttgtagctgaggacattgaagctcagggccattaagcagtgggcctatgcacatcactcacgattggccatgattcttatcttactcaatcatagtattgcattactgctttctaatatgcattttagtttttccttctcaatttgattacttctatgccttgaatatttctatccatgtagataggtttaatttactctatcctctcctcactgcttacaagataaaatccaagtttttctgctggatgtgcagagatccagttggctccagcctacctttgcagccacagctcctgccatgtgcctctttgcatttgatgcctcagccaccctgggcctccccaaccgcatgcctatgcagctgcttatgctgctctctgccaggaaaacctggttcctctttacctggagaacacctacccttctaagaggccttgtgaaaatacagtcttgtgtgaagcattctttgatcacctcctgccctatagacaaagtaatcaaataactgaaataccatactacagtacatgtcacttaatgacagggatacttctgggaaatgtgttgaaggcggtgtcattcttgtgtgaacaccctagagtgcacttacacaaacctagatggtacagcctactatacactaggctagatggcacagcctactacacactaggctagatggtatagcctattgctcctagggtacaaatctgtactgaatactgtaagcaattggaactgtaaaaatatagcctgaaagatgaaaaggtatacttgtatagggtgcttatcatgaatggagcttgtagggctggaagttcctctgggagtcagtgagtgagtggtgagtgaatgtgaaggcctgggatattaccatactccacacataggctacactaaatttatttttgtttaaattttttctttagtcatacattagtcttatcttactctaacaactattttactttaccaacataatttttttaactttttgacttagaaaatgtttattttaagtacaaagaggtatcatggttttcattgggtagatcccttggataatcctttcaaggaagatcactttgtccatcttaatgaaacctgtatcctttccatactgatagaaacaccagtggcacataggtcagaccatgctggtttgagcagaagcgacaagaacgagaaccctgttggaattttcgagggtggctccaggacagccagctggtgaccaaacatgctctcaggagtgaaatgaggtaaaaggtctttttgacttttttgtaagaatatttagctcaaaacacaaacacattatacagctgtacaaaaacattttcattatatccttattccttaagctttttccaatttttaaaatgtattattattttatttttaaactctttttttaaaaattcagacataaacacacacattagcctagacctacacagggtcaggatcatcactatccctgtcttccacctccacatcccgccccgctgggaggtcttcaggggcagtaacacacatggagctgtcatctcctgtgataacaatgccttctttgggatccctcctgaaggacctgtctgaagctgttttacagttaccttttaaaaaatatataagtaaaaggagtatgatctaaaataatagtaaaaagtgtggtatagtaaatacaaagaccagtaacgatcgtttattgtcaaatattttctgctgtatgtaattatacatgctggactttcacacaactggcagtgcaaatggttgggctataccagtgtcaccaggaacatatgagtaaagcattgtgctaagaccttaggacagccgtgatgtcactaggcaactgtgagttttcagctcctttaggatcctatgggaccaccgttctgtctgtggcccattattattattattattattttattatactttaagttctggggtacatgtgcagaatgtgcaggtttgttacataggtatacatgtgacatggtggtttgctgcatccatccaccaatcatctaggttttaagccccgcatgcattaggtatttctgctcatgctattcctcccctagccctacaccccctgacaggccccactgtgtgatgttcccctcccagtgtccatgtgttctcattgttcagctcccatttatgagtgagaacatgcagtgtttggttttctgttattgtattagtttgctgagaatgatggtttccagcttcatccatgtccctgcaaaggacatgaactcatccttttttacagctgcatagtattccatggtgtatatgtgccacattttctttatccagtctatcactgatgggcatttgggttggttccaagtctttgctattgtgaacattgtctgtggcccattattgacatgaatatgctgctcatgactgtgccctcttctcacctctcttgtagttccttctgcttgctatactgtaatctcttttgacaagctcaagagcaccttgaaaatagaaactgcatcctacttatcaacacctctcctggaaatcacttattttccataccctgaaatcactctcctggttctcctcctacttcactggaactgccattgaggtttctctcaaaggcgctgccttttctcccaatgtttgcttggtgaagagctccagggctcaggcctggccatcctctctggctgcactcacttcttgctggtattactgggtgtcagagccttaaacgtgctttatactcaaatgccttccacgcttccatcttccggcctgacctttgctttgaaatgaagaacctccagcacgttgggaggccgaggcgggcggatcgtgaggtcaggagatcgagaccaacctggctaacacagtgaaaccccgtctctactaaaaatacaaaaaaattagccgggtgtggtggcgggcgcctgtggtcccggctactcgagaggctggggcaggaggatggcgtgaaccagagtttgcagtgagccgagatcgtgccactgcactccagcctgggtgacagagcgagactctatctcaaaaaaaaagaaaaaaaaaaaaaagaaatgaagaacctgtgtcttctcccgtgtctaaagatgtttcacgtttgtcctgtatatgccaaattctcactttccccctacaaactgccctctgtttccttcattttgataaaagtcactacatgtgcacaggaactcagttcaaaagcctcggactcacttttgagtcctctctttctctcacaccccaaatccaatctgttagcaaagcctggcttacctttaagataattccagctgcaactctttctcaccacgtgtatgctcccatgatgttgaggcccgcacatctctccccaagaatgacctcagcaactcctcactggcttcctgccctaacttgttcccctcggtgtgctcatcacgggccctggagattcattcttttaaagagtgagtcagctgatgtccttctcctgctccaaaagcacttacagcttcccaacacactaagaataaaatccaaactccttacaatggcctggactgctccatgtgctcagccctgtggctctccctcatgctccagccccattgcttatcttctaggcacaggggtccccttgctctttcccgagagtgctccttgctcagacagtgtggattccctcggctggacagcctgccttcagatacctacttgttgcacggaccacctcatctcagtcaggtctctgctcaaataacccttccccagaggggctcatggtatattaactggaattccacccactcactctctttccccttcccttgttttatttttattcatagcattaatcattgcctgaaactatattacatatttaattcattcatttattcaacatatacatgctaagccttcgctttgagcgaggcactgttctaggggtggggtctacaccaatggccaagatacacaaaggtcctgctcacaaagagcttacatcctggtggaggagggtggatcttcagcaacttggcaaatgaaggaatcatatgctgggacagtaggtgttggaagacaaattatgcagtataaaggaaacttggagatatcgtaggaacttggagatattgtaggtggggtttgggacatacctaattttttttttttttttttttttactatccagtgaacaaagagagtctgacaggtaaagtgacatttgagtagagacactgaagtgagtgagagcatgagccatttgcacagggagagaaggtcacaaccagagaaggagcaggcaactggtgtggccaggacattaagggagcctgaggcttgacagagggaataaaggaagagtataagaggtgtcaccagaaaggtgacaatggccaggacacatggggttttgagacccatggtaaagattctggcctttactgtgagtgaaaagggaggtcttggagggcttggagcaaaaggtgggcatgactgaggggcccgcgaggagaaacaaaggtaacagttaagggccctgcaaaactgcaggagagatgatagatgctgcactgatgtggtgggggtagaggtagtgagcttcagattctgacacaatctgaaggtagaaccagcaggatctgctgatgtatggggtatagggcgcgagagaaagagtggaatcaaggatgacaccattatttttttacttgaacaactaaaagaatggagtgttgttgttgtcattgttgttgtcgttgttgttgttgttttaactgggggagaatgaggaagaaacaggttgagaaggggccaggaaattcagtttgatttggggcatagtaagcttgagaggcccagtttggcttcctgtagataaatcaagcaggcagttgaatctgtgactcaggaattcagaggagaggtttgagcatcatcagcaaatcaatagcgtttaaaagcatgatataggatttatttattgtctttcagccctaccatgagggcaggggactttgttttgtgttgtcctatgtgtaatttccagaagagtgcctggtgcacagtaaattgctcagtaaatattttgaatgaatgaataaatgaacgcttcagtagacagcatctagcacctgacaggtacattataaatacttgatgactgaatggatgatggccctccagagggactagcacagtacctggcatatagtagtttcacaataaatactggatggatgattgacacattcaacgtgattcaacatagaactagattgcctgtttccaggaccagatgtgagaacaaagaagccataaaaagtaaatatttcatgtccgtctttttctgtgaggctaaattgagtgtggtggtggaatctccagcaaaccttggtggataggaagttggacctgctggtaactacacttttgctgtagaactacggtagtggtggaagatgccatgactgccctcagtagaatgagcacaaaagtagagctcgggaagagggaagagaagggctccagaaagaagcaacttccctcctcccatctggaaagctgctgagatgctcttccctttatatccagacaaggaggatatgtgcaaatgttttcccaaagggaatgcaatttctacactgatcccccagggtgtgtaataaatattttagaagcatatgaatctcttgttctcttatgatttccttctccctagcttttaatccaggctgccttcacctcctgcgtctctgtccacgtccctttatagcttttatatttccctctccctttctgtgtctgctatcagctttctttcccctctccttcctggactcccatttctttgttcaaaaatgttcccaaaaaaggagaaggggagaaaagatgcacagagcatcccagtgggagagaactgaagaaaaagaattgccaattttgaagagcctttccgtttttattacaatgttttgtgcttgcccatatcaaatctttaaagaaaacactaacattaataatacatagtttgctttgttcaactccattttatcctgatccaaatgcaaggcataggagcttgtttatcccatgcttcacagttgcccctaccctgctcccatgtgcatcttttctcatctgttttgatttccgggtgcaaaacaatttccgcttgttgtgggagcacgggcaacctctgctggagcttcctaagagccatgtcccagctgttgccagctgtgctccctgtagggtgcctttccctgcctggcaaggcctttggcagccttacaggccttctgatttgccaaaccactttatgatctcttgttatggtcaccttcgaccccagaaataatggtctctgttgtcagattccattcaaatccaagaagttgttgtcaataatacttttgtaaatgcaagaaggacaatgtcagttgaaacgtgttgggtttgtcttcccatactgctgtgaatcatgcatatgcctcatctgctgctacttataataaaactgcgtaacaattacctctttaaaaatagatgtttttcttctgttttcagtagtgttcatggtattgggcattttgaaaaagtatgaaataaagtttttttctttgcaaagagtgagttcaagtaaaaactgacctagtgtatttattttttcttctatttttgacaggggaagaaaaacagggatttcttccctccctatctcatgttcttttccttcctgcctctttccagattgatgtctacaaaaccctaataattctctaaaaagatggttctgcatgaagaaggcaggcaaaaatctcaacaattatagtgtcttcagtcatcagaaggaaaaaaaagaactctagaatttttatcttgcaagatttctatgattttttaatttaaatccactggtgaggacatggccattctgtaagagggtgccaaacaaatggcctataatattttttaaaaaacaaaacaaaaactgaacatttgttgcagaaacttcctttcctccatgtcaacacaaacaccagctccagaggtgtcccatgggaatggaacatgacacctgtaactcttcaagactctttgatggtttcctttagaagaaacaagaggaagctattaattgtcttaagactcaatttctcacaacctgtgctttgagaatgaagctcagaccctacagggaatacatttcgactacaaaggattttctctctcaacaattgtggatgactttttttttttttttcctggagtgcttttctcaaagtttacatcattgtcacctcctttgaatctctcttctttgtagcttatctggatattcattttgcacttagattattctaattcatttcatttcttccattgtaatcccttctgttccattttacccaaaaaacatttattgagccttcatccattaggactctgtctctgacttttaggagctctcaattgaataagagtgacaagggcaatgacatttatactgaaaactgtaataagacaactacaatctcagaatattaacgttttaaaagagatgttcgaaacataccctagagataaaggggaggaggttgaaacaactatgcatttgttgggggaagacatttgctcagaaatcaaacttgaaagtgaaggtttaatccaagaactacatcaaattataatatatgcccatcagttcccttcaggatagcttaccatgattttagtttcacatacccacattttgcaaggataccctcacacaggactgtaaaattatttgaggcttatataggatgaatattgtatagagtggtttaaaatgtttgctcttggcctggcgcagtggctcatgcctataatcccagcactttgggaagccgaggcaggcagatcacgaggccaggagattgagaccatcctggctaacacagtgaaaacccgtctccactaaaaatacaaaaacaaaattagctgggtgtagtggcgggcgcctgtggtcccggctactcaggaggctgaggtgggagaatggtgtgaacccaggaggcagagcttgcgctgagccaagatcacaccactgcactccagcctgggcaacagagtgagactccatctcaaaaaaaaaaaaaaaaaagtttgttctaagtgatagttaagccaagttgattcatttcatggaattttactgatcatggattttgtgctacgacaggtgctagaagtagcatcataaaaatcagaagaataaaaatcagcccatgtccctgaggcatggacagtgttgggcaggtcttcttaatcatcaacatgacctggaataaagacaaatctgaattccccccactgcagtcctggcacagaggctgtgcgtatcatactcttcagagcctcagtcaagtgcaagagcgtgaccaggctgtcctccctctctatgttgtgagatagcataaacggatggatgtgaaagtggtctcaagagtaaaagtgctatatgtctgaagggggagatgttattaaaataagttctagaagcattttatagcatgctggtaatatgcaccctttgtaaaatgtgttttatttacagtcatatctcttaaaagtgtcagaattataggaatacatatcttacatttttctgaaattacttctaatgctttatggttcttgttaggaaaataatttggcttctcctagaacactgctcttgtcctcttgagctatgggaaagcaagataagacacagcaggttggcctcctgccactctgggcttggtcagtcatgcatgcccacttcctggcttgggccaaggagctctgaaatctgattctgacagagctctcatcactcaataaattcaaggtcatgtaaacaaaatcaggaaaagatttgtgggctttgttacactcaaaatgtacttgcatatagaacaaagtagaaccaagattataaagttctacaaatctaagactaagagagtctcaacccaatattacaaaatgctaccaggttgctctcagatagatatagaaaattaaagttttctctataggaagaagcaaagagaagatcaggataggtttgacgatgccctacagagccttccataatgatgatcagctatcttctcctcaataataacgatgagcaggtaccttatatgcactgcttaatttaaaagcctaacaatgatgctggagaaaatattcagtgtgtgtcagtatgtctctgtgtgtgtgagtgatggtgaaaaaagtgataccatggaatactatgcagccataaaaaggaataagatcatgtattttgcagggacatggatggagctgaaacccattatcctcagaaacgaactcagaaacagaaaaccaaacaccacatgttctcacttataagtgggggctgaatactgagaacacatagacacatggcaaggaacactacacactggggcctgtcggagtggggagtggggagtggggagagagagcatcaggaagaatagctaatggatgctgggcttaatactgaggtgatgggatgatctgcgtagcaaaccaccatggcacacatttacctatataacaaacctgcatgcctggcacatgtacccctgaacttaaaataaaagctgaacaaaaaaaaaaaaaagaaaaatgctatggaaaaattaaaacaggctgtgggtacaggaaatgccagggtgatgtggaaaggttgctgttttatgggcggtgatcagaaaatgtctcagtgattcggaagccttctgggcagagagcagaaagaagtattggagtgatccatgcatatttctgaagaaagaacattccaagcagaggtaataaccaataccatgccctgaagtgggagtattttccctatggtaaagaacagaaaagagcccttttggtctcaagtggacagaggggaataatgatagaacaagaggtcaggaaggtgaccaggccaggtggcactcaatgtttcagaccattgttagacctttggcttccactctgtcattccttgaagcaactaccaaaggtagagaagaaaaccacaatgctatatgaaaatgggaggctacactctgtacttttttaaatttttttaaaaaacactgatgcacagcagtttgacatttttgtttgcagtcaatactcatgaatagatctcttcaaaaactttcaaaatatattgactaggactccacctctttaatcgaaaacttcatggttttagacaacacgataaattatttagaaaacatgatgaattatttgtctaaacatattctatatttttatagattttaactcttgactgcaaaataaagtgaccaaaggaagagaaaaacactctatttcaataattccgtttcaaatcaaaagaaaaatggtggtaacattacttaaattatggcataaagtgatgttacatagcttagaggttcaaggagaaataaaacttgaagattttacagagttaatggtccagctgaagtcctacacatcaagaacaaaggccattggtcatctgttttttcttgtgattctcacagccctagtatatttccataggtttccatgctccctatttcattttaaatggactctgactatgcattcattatattcaaggaaacacactggtcacaactcaaatttttgccatgcagctacaggttcagtattatatctattcaatttaagacagaagaatcatacaacttttgaaggagagactgtctaaaaccaatgtctaaggatgttggcatttgtcaagattacttggctttatttatactctacgacccctccacagaggaagtttgaattttcctctacaattcctctgtagtggaagtttgaattttcatgtttagtagtttgagggcgaatttgaattcctggctcttaggcatataggatccgaagaacccaagtcctgatgttttaaaatatggctcttaggcatataggacccgaagaacccaagtcctgatggttttaaaataatgtgtatcaagacacagtgcatgactttattgaaatgggacactgtagatttgaagaggaatgaacatttatattttgcaaaaatgtggttgctccaaatctcaaaaaaaatgaaagccagaagaagtggtacgtgctacacaaatggatttgaattcaaatgtgggtacaattcctatggagatactattttaggctttctgcgtctcaggcaaaagccatgctctcagaattctgtgagtgtgcttccccgtgcatggtagcacaccttgaaattcagccagaaagtagatccgggctagtcaggtggagaaggaacaagaaccaaaactggacaaggcccctagggactaatggtagatatgtgatgattccaggtgcagggagctgaggaaagggtccctctgccagccctaagacagcataggaataggaacggcaccatgcaaagagcagaggagcagtctgcaaagacaatctaagctccattgacatgaggggccaagagcagcagagctgggcatggctgctcatgcctgttacgctgcctccctcagaagagctaagattgagggcttgtcagcagctggaggggtcttgcctcatcactatgccgtaggtttccttgttaggcctggcacaatatgagatatccaagagcaaaaggacatcagttgtctgcagagggcagaaccagctcaagctgaaaaccactcatttcacatagatgggaaaagcatggtgatggagcatcgcagaggaggcagagaaattccatgtttaaaagctcaaagtctggaacttgcatgcctgggattgaatcctattctgattctcactgcctctctgatcttagacaattgatttcctctctatgcctcagcatccttaactggaaaacagagatgtgcattagaactatgtcatagagttgtcctgaggatgcaaggaataattactttcaaggacatgctggcaactgaggaagagcacagctcatgtccgtgactatgttaactgcaggaagttaacatcacggtatgttctgccaacagggaacactactcaaatctaagccaacattcgaggacaatatgctagttcctggctcttaggcatatagtacatgaagaacccaagtataggcctatttatcttgtctgtggcttaaagtcacatttcaagaagcagtgaagaggaaggtaataggttgtgaaatgcagatctggagtggcttaatcacctcatacatcaaatcaggattgagtcgggacactgatgttaaagtaagtctaacagtgtgaaaactacgtgactctttggcatcctcagggaaactaagtcatcagtagaccatcatgccttaatggcagtgtcttgtctcggtcttatcaaggcccccctgcaagtgaaattgttcagctcctctaagagttagtatttatcaatcatgcctcattgttggattaaatatattaatataatcctcatccaatttgataggtctggggtgggacatgaaatatataatttttaccagaacctgaaaaatttccataatcaggaaaatttagtcaaaatttggaaacactactccaagaggatatgtaactcctgaacttaaccttgggtccagggaacagcttcccaagccaacttccagtaggagccagagggcattgaagcagttgtccatatggtcctttgtcttgttttctggtgtctttacatgctgtaaatccacatggttccctttatttattatttattttgttttactttaagttctgggatacacgtgcagaaggtgcagatttgttacataggtgtacatgtgccatggtggtttgctgcacctatcaacccatgcattagctatttgtcctaatgctctctctctccttgccccccaccccctgacaggccctagtgtgtgatgttcccctctctgtgtccacgtgttctcattgttcatctcccacttatgagtgagaacatgtggtgtttggttttctgttcatgtgttagtttgatgagaatgatggtttccagcttcatctatgtccctgcaaaggacatgaacttattcttttttatggctgcatagtattccgtggtgtatatgtgccacattttctttatccagtctacaattgatgggcatttggattggttccaagtctttgctattgtgaatagtgctgcaataaacatgcatgtgcatgtgtctttatagtagaatgatttataatcctttgggtatatacccagtaatgggattgctgggccaaatggtatttctgcttctatatccttgaggaatcaccacactgtcttcctatttaacaaatggtgctgggaaaactggctacccatatgcagaaaacagaaactggaccctttccttacaccttatacaaaaattaacccaagatggatcaaagacttaaatgtaaaacctaaaaccataaaaaccctcgaagaaaaacctaggcaataccattcaggacgtaggcatgagcaaaggtttcataactagaacaccaaaagcaattgcaacagaagccaaaattgacaaatgggatggttccctttatctaagtggattcctggtcccgggtgccatagcgctggggcctgtacttcaatggcaaaatttcttctttacctctccctttgggaactatcatttgccagttggtcttgatttgctgaacatttttgctttttccagcctatatctgcccaaggagctgtacacagacagatggacagtcttgcatgccaagaggcatggttgtcatgataactatggtagaaataatcaccataatagtcatatggttgcactaactcctaacgtgggctatgcttctcaccttctaccattatcaagggctgattttctccatcaacatagaattttttaaataggtaacgtgtttcatgaaccaaataagcaaaggaagatacagggtaaatgattttaacaaatttctagctaattgtagacaaattcctagttagtatggtcttagcgatggggaaggggagaggaagaatagaccctcctatctgctatatcttgaagttatacaaatgctttcagatgaatctgtttctgagtcatgtttctgtgcgaactataaggaagaaaagcaagatctaaaagagaggatatggggcacacctgcattgttaaatgataccataaaaccctattcaggaaagtggatagatactcaagaccaaaagacatgctttctgatgacaatctctacatgttcatgtattatagacatgttttatgaagctgtacaagaatttcccagaggatctgtcacctttacccaccaccctctgctctgctgacacgggcagtttctctcctgagccacctgcttcttaaagacacagcatcaccctcactgtgagttctacaggcttctctccacccatcttgttgtctttggtcctttccttcccttccatttttactttctcttttttctggtactttttatttatttatcaggctctcccttcttcacccttgcatcctctttttaagcattaatagtgcctcctggccagcaccaatgtgccagttctcccatcacagttccttctgtgtttgcctttgttgtccccagttacacatcacatctcctcctccttctcttaagctcctgctctccttgcacccttcctggttgctttcctcagaacacacaggctgacagaatggggccacggaatacagttgcaataatgtcagcagctcaggggacaaaaatgaaaaggggagaaaaggaaaaagatggttttaattagatatccatgccactgactcacacttaatatgcaaatttttagcccttccattgttaagtgaaacaagagttttatttaaatgtgaaaatggctgggagatgagaaggggtaattaagtagcagtaaaatgtaaaccctggttcacagtgcctgtaataacatatggaagcacaggaatcctgctcactggagagagtggggcgccttggcttaacaatcctctctcacgatgacgatgataacacacatacttttaagtgcctctagtggattctggttcaaaagcagtttcgcatcccttatagctgatcctcacagcaatattcacaggagttcaggggtgactgatgggctccattttacagatgagaactagaggctcaaaaatggtaggtgacttattcaaggtcccctggcagcagagtcacctggggtcttcccccgctattctacactgccagtgcagaagctagcactacgcttgggatataggcactaaggaaactggttgattacaaaggcaatgttgaagaacctgagtttaacaatatttttgcatctccgttggctggtgatgttttattggaactttgaggctacacttttttcctgaggtgtcaggaaaattgctaccctatctcaaaggttctccttggtgccattattagtacctagaaccaacacagtacttggaaaactgaaattcacagcagtcagtgcacgtagtaattaccacaacttctactgatagaaggtattgatcacttatgcattgtcaggcagcatacattttcctgtccccactattgcatttggtgctttacctacaagaatacaattctattagcaaataaaatctaacaatgcattaaaaatatggtgtgtctgaaactaatgccaagaatgaaaaaaagtatcaatattataactgaggaactctaaaaatttaaaaaacaatgagtttaataaaacttaaacatttatttataatatctcaataagtgagatcttgaaaatagaaactagcattataactagtacaaaaaccactagaggcaatttgatgataacagaatgaagacaaaggatgctagttataattattaatattgaatatttttcagaaatttagccaatgcaatgaggtcagaaaaaatgaaggaatacataaagaaaaagaagaaaaatcatctttatttaaaatagatatggttttctacctcaatgatccaaggactgtatattttatctcgtttgcaaaattgaagaaaatacagatgtggtagctatctcttagagtaacctagcatattaaagatataatggtatcttttatgcacctttgttaaaagcaaggagagatatctgcttcaaaattgtattgaaatagaagacccaaatgcatctctcagcttctcactaagataacttgcaaaaacttggaaataaatgatactcatatttttgggaaaagtaagattgaagaataatctagttcctaaaatcaatcaaacaatactaataaggaagatagacttgatttaattaatagagacaatgctcaaatcatggcatgccttatctttatgaaacaaagatttcaaagaagacaagaagtaagtacacgcctccatagctatctttacccttatgcagataataaagcttcaaaaagggaggccgagcagccattaacaatacaagcgctgacttggatggacgcattcgctatttactgctgactaaaaagtcacctcaaaaattagtggctccaagcaatgcatatttattatctcacactatatctgtgggtcaggaattcagagctgtgtctcttttggtccaggctttctcatgagggtgcagtcatgatatcacttggtgctgcagtcatttgaatgttgacccaggctggaggatccacttggaagtggaagatgcacttcccaggcggcttgcaggctccaggctccaggctggcaggttaaatgtaggttgttggcaggagtttctcaccacaagaactctcggtgtcgtcagggcatggcatggcagctggctgctctcagaatgacttgtcgggagagagagggtaagacacagggtaagcgtggcctttatgacttggctggggagccacgagctattgtgtggctgtatgctatggtcatgcagaccagcactgatgcaacacggtgaagagtgctcaagggtgtgaatatcaggaggcggggtcactgaggtccccctggagtctaccctcatagactttctaagcaatcacaatgggcttgcaataccaatgcagcttcaaaccagaggagtcaatgagtgccccccaagccctaaattattcaaattcttcaaccattaccatgcatcagagatctcagaggacaagaaaaaaagtaccatttcataaagagaagtataacaggtggaagctagagactgtgaaataaaccagaagctctgcagcctaataaatatttgaagagtagaattaaaacaggactcaaaatttactcaaaaggcagagaataggggcaaggcaccatccacttaccacacagatcacaccaatttcgagaatgagtattgagaaaatactgtggaaaaaggaaaataaagactagtcacaaaaattccaggaagaccgtgctttaataaatgacttctattgtacagcagtgtgaatgtactcaattcatgtgatcgagccgtacacttaaaaaggttaaagtggtaagttttatgctatgtgcaccatatcacaataaaaaaatcggcttccagaaccctaattaaaattgtagacagccacctgacaacctccacagaagcagaaaagtacagccttcaggaaaaggctgcttaaggggcaaaagatggaaaagaatgacatagaccagagccgaagaagaaaagttgttgagatgaacgaaaacgtccaattagttagatatggagagcaagcaagtgaccttaaaacagcaacaaaatttaaatctccatcagaagtaaaacatatcagatgtgaggcttcaaaaaatcaaatcaacagagtgaatttcaaacctgagcagctctcccgggatacagaagaaaagacagaaggagattaagaaagcaagagaaagacaaaagatctgaaggaaacagaagaaagagccaacacacgtggaactaagtttccttagaacgagctacaacagaaccaaccattaaatatttaacacatgcccactttctgcgaaaaaaaaaaaaaatctatgtgtgtgcctaataacagacttactgcatattaggagaattcagaagagacacatcacatctcccggaaagaattttcaacctcacagataaaggcatatcttcttatcttcacacagaaaatggattactcatacaattacaactatcagaaaagaagacctcagcttgctctacttcatcactaaatgccaaatataatgaaggggtaaccacaggagttttaagggtaaagattgtgacctttggattttatgctcaggaaatactccaattgcatttgacagcaacaaaaaaatcttcataggtaaacacttcttgagggatagtctgtgttatgattgtatctctagcacctagtccagctattattgcaaaacaggttttcaataaatgtttatcacctgaaggaagacatatcctaagaatcagaaaatacaacaatcacacatctttttagtaaaacgtcttgaaatgtattccaatgaacttaagatgaagcaaagggaaaagctaactagtgtcacctacaaaggaatcataatacgaaagaatgaggtggaagaattgttataaatctgataattaagctaaatgaaaatgccaatgtctcaacatgtaaacgcggattgtgacttcaaaaggtgattttgatagtctgagaaacacagtgccaagataggaaggaggatgaaaggaggctgccgcaattcttacctcccatagaggaagtgaggaaacatttactcagcttgaataataagactcacacaggctgcaaatgctcctggaaaatataaatctaaccaccactataaaaaatcaaatatttatttcaaaaaactatagaggataaaatcaaagaaaatttgtttcaaatagcacaagatacaaaacatgaaagctactagacagaacaaaaagaggaaaacaaaaagctgacgagaaacaaacacatcagttttaatacctgcaagtgggttaaactccccattataatgaaaaaaaggcttcagttggattaaaaaaaagataacagaatatatttctgctctgtttacaaaagctatatctaaatcagactaatacaaatcttttttaaaaggctgagcaaatgtacatttagtattaacaaaatcaaagtaggaaatacaatcttaaagttagataaggttaactgtaagcctaaaacattaaattgtaaaaaaaaaaaaaattatactgataaaagaagcaattcatattaaagctctaattacttttgaattttatgtgtaaaatacaaaaataaagcaaaaagtattaaaatgcatagataagctgaaaacactttattaaaatccggtattactcatttttgctttcataaagtttagagaagcaaacaatgcaatatggctatgcacaatctgaataacagaattctctctcagtctggatgtttatgtttaatatttatcttgtactgtagtattaatgaagtattttataccatatgaattatatataactataggtatattcaattacatatactttgtacaatgtttatataatgtatactattgtgtgctcatacattaacataaatatctataaacttgacaactatcgaacagttatcaaaattgaacctatacatttccgaaattaattcaaaggtaaaatttctgaattaaaaacaacaaaaattttttttaaaattgccaaaaaatactcacaaactaggtttgaacctgaataactatagagacaatttttctctaacatttaaggaatataatttttaattatattttaaacaattcatagttcaaatagaggatctatcaattaatttgagtatggtgttgtaaacaaaacttacagacatgtttcttaaaaatatgataaactagagatattcctagttataactactaaagcaaaaacagtaaatatggagtaaaaaagaatgttttcacattaaaaaataaacatcattttaaaatcatacatatggctgaaagggaaaaaataatatgactatttttgtaacttatctaagaagaaaatttgataacacctatcttttcctgactaaacattttattgaaatgggaaaaggggtattcttctttaagtggtaaaggagctctctgaaaccatcatcatacctaatagaaaacactagaaatattgctattacaataataaaaatggcaaagtaaccgttaaccattaatattattaaatactgctttggaatacgttgatatcagttatttttaaactctttcagaaaataaataaagggaaaacatgtcccaactcattttatgaggccagaattactgataccaaaaccagtcagtaacattacagaccaattgccctcatgaacaaaacagatggaaaatcagtaacaaaatattgacaaagttaatcaactaatgcaaaaaaggatagtatgagtatgtcatgaccacaccagatttattcttggttgcaaggttggtctaccattaaaaaatcatttcacataattaatcatataatcatttcaatggatgccaaaaaaaacattggacaaaatggaagatctagtcacacacacacactctgttatggtttggccatgtcccaacctaaatctcatcttgcattgtatctcccagaattcccatgtgttgtgggagggacccagggggaggtaattgaagcatgggggtctttcccatgctattctcgtgatagtgaataggtcttatgagatctaatgggcaattattaggggtttccgcttttgctttttcctcattttctcttgtcaccaccatgtaagaagtgcctttgcctcccaccatgattctaaggcctccccagacatgtggaacttaagtccaattaaacctctttttcttcccagtcttgggtatgtctttatcagcagcgtgaaaatggactaatacagtaaattggtaccagaagtgggatgctgctgaaaagatacatgaaaatgtggaagtgactttgtaactgggtaacaggcagatgttggaacagtttggaggtctcagaagaagacaggaacatgtggaaaagtttggacctccctaaatacttgtcaatggttttgaccaaagtgccaataatgatatgaataataaggtccaggctgaggtagtctcagatggagatgaggaacttgttgggaagtggagcaaaggtgactcttggtatgtttcagcaaagacactggtggcattttgtccttgtcctacagatttgtggaactttgaagttgagagagatgattttgggtatctggcagaagaaatttataagcagcaaagcattcaagaggtgactgttaaagagtactgttaaaggcattcagttttaaaagggaaacagagcataaatgttcagaaaatttgcagcctgactacgtgatagaaaaaaaaaaatttctagggagaaattcacgccagctgcagaaatttgagcaagtagcaaggagcctaatgttaattcccaagaccatgggggaaatgtctccaggatgtcagagaccttgatagcagcccctcccatcacaggctcagaggcccaggaggaaaaagtgattttgtgggccaggcccagggtcctcgtattgtgtgcagcctagggacttggtgccctgtgtcgcagctgagccactgtggctgaaaggggcacatgtacagcgcaggctgtggcttcagagggtggaaatcccaaggcttggcagcttccatgtgatgttgagcctgcaggtgcacagaagtcaagaattaaggtttgaggactttcacctagatttcagaagatgtatggaaatgcttggatgcccaggcaaaagtttgctgcaggggtggggccctcatggagaacctctgctagggcagtgcagaagggatatgtggggtgggagctcccacctagagtccctactggggcactgcctagttgagctgtgagaagagggctactgtccttcagactgcagaatggtagatctaccaacagcttgcactgtgtgcatggaaaaaccacagatactcaatgcctgctcgtgaaagcagttgggagggaagctgtaccctgtaaacccacagaggcagagctgcccaagaccatgggaacccacctcttgcatcagcatgacctggaaatgagacctggagtcaaaggagatcattttggagctttaaaatttgaccacaatgttggattttggacttgcatggtccctgtaatccctttgttttggccaatttctcccttttggaatgactatatttacccagtatctgtacccccatcgtatctaggaagtaactagcttgcttttgattttacaggctcataggtggaagggacttgtcttgtctcagatgagactttggactgtggacttttgggttaatgttgaaatgagttaagactttgggggactgttgggaaggcatgattggttttgaaatgtgaggacatgagatttggaggggccaggggcagagtaatattatttggctttgtccccacccaaatctcatcttgaattgtatctcccagaattcccgtatgttctgggaaagacccagggtgaggtaattgaatcatggggcccagtctttcctgtgctattattttgatagtgatattaagtctcacaagatctgatgggtttatcagggctttccacttttgcttcttcctcattttctcttgctgccaccatgtaagaaataccttttgcctcttgccatgattctgaggcttccccagccatgtggaactgttaagtccaattaaacctctttttgttcctatgtctttatcagcagcatgaaaacggactaataaacacacatacacacaaatcagctactaggaatagaaaataacttctcaatctgataaagatcatctgtaaaaaacctacagataatattattcttaatgggaaaaataaagtgtttttcctctaatcagaaattagacaaggatgtcagtattacaatgtatttttaatatcatgttactggagaactgagccagtataataagacaagaaaaattaataagaggcatactgactggtatgaaagagtaaaactatctcctcatagaggacatatcatttatgtaaaaaatcttaagtatctaaaaaaagtactagaatcaaggaatacatttagctgtcacagtaggcaaggtcaatataaaaaagtcaattgtatctctgtgtattttcaatgaacaattgagatttttaaaatttcctttataatcattcaaaaatatgacataatttggaaccacacactgaaagccataaaacactgttgagaaaaattagccaagacttaataaagggaagaatatattttaaggcttggaaaaactcaatactattaaatgtcaactgttccaaaattaacatataatttaaatgcattcccaatcaaaatcttaacatctttttggtaaatattgtcaaaccgattataaaattatatgaaaatacaaaggacatagattggccactattttgaaaaaaacaagtttggcaatctacattgtctgatttcaaaacattaacagtgattgtaatcaaaacagtatggttcaggcataagaatagacatatagatgaatagaaaataagagagattcccagaaagaaatcagtcaattgattttcaacaaagaaactaaggtaattcattagaaaaaggattatgttttccacagatgcttttggattaactgtagagctgtatggaaaaaaaatgaatctcaaatgttagctcataccatgcacataaactaactcacatggatcttacagctaaacaaaaaagttacagttctaaaacatctagaaaaaaaacatagaatataacgtttttaacctccattaagtgtgaaatattgataaattggacttcatccaaatgtaaaactgaattcctttacaagattcctttagaagcaccattaagaaaatgagaaggcaaagcataggctaagagaaattattccgaatacatatagctgacataagacatgtatctagaatatataaattatgactccataataaaagataaacagcccaattagaaacagtcagaagatttcaaccactacttcacaaaattagatataccaatggccaatgaccatgtgaaaaatatgcccaaactcattaatcctcaaagaaaaacaactcaaaaccaaatatgttttagcctacacagttattagaatagataatatttcaaagacaggatactatacaatgacaagcctgtggaacagctatagtgcttataggaatacaaattggtacaaccattttggaaaatagtttggtggctttttgtaacgttaagtataaacttactatacgacttaccaattctgctcctaagtatttactcaagaaaattgtaaatatatgtccagaaaaaggcctgtacatacgtgtttatagcagctttactcataatagccaaaaagtagaaacaaccaaatgtccacccaactggcaaatgagtaaacaaacagtggtacaatcatataatagaatgccacttagcaataaaaaaaccacacacaacatgaataaaactcaaaaggtgagtgaagaaatccagaaacaagagtatatgttctaaaattatacaagattttacatttttttcagagtgtagatatgtgtgtagggtgcaatatatagttcatatacacatgttttaaatatatatttgtgtcatgtagattatatatacatatagaatgcatatacatattttgctaaatatatacatgtaatatatatatattaaactctaaaaaagtctaatatataacagcagaaaacatatcagtgtttgcctcaagttgaaagtggggataggttttgggaagaataagaaacagggaagcttttgaggtaatggtaatatgctgtatcttgattaggatagtgattatatagatatataaatttgtcaaaactcaccaaaagctgcggtaatttaaattatgaccgcaagatttttttaaataaaaagcccttgttcttcccttatgttcactgtctgtttagccattcatgattcactcttcatgtacttctcaaacctcattacatatcaaggtatagatgttttcttgatttgtagccctaatgttaagcagaacaatggttagtgctgcttaatgaagaagttaagagaagaagcctatttggtttatgttagaaatctgagaaaattattatggaaagaggaaagcagataagggaagaaagtagagatctgggtagcatagaattctcatggaatgtggaagggaaagagaaaagattgccaaactgtgagtgaaatagaaagactggcaaaaaagcaacattcaactattttactacctgttatggaaaacatttgtcctttggggacccctttgaagatttgaatacagattttgcttacattaatttttgtttttgttttcttagcgggtgtgatcaaacttgtttccatggaaagcagtgtcataatgggaccatcaacaaatgagttcaactttatttggagtacaacaagttcatactttatgcttcaataagaaaaaatgaattttatccttctaagtataccatgcaatttcccattttcatgtctcttctcttatctccattgcctagaatatttctctttgcctctacctcacccatttcattttccttcttttgaataactctgaatctatgtttacagccagattagcagtcacctcttccaggatgccatccctgattctttcacatttaacaactggagttaaatgatcctctcctgtgaacctacaacatgatgaatatatcactaatgcacccacttttattgtactataattaaatgctattatgtctgagcctttcactaaactttgagcttcctggagaaaactataattttatttattcttctgtttcaaacacagtacataacacgtagaaggcacccactaattcattcttgaatgactgaacaagtgcatgaataaataaataattgaaggaatgttgtttccagatgcaatacatttagccaaagtctccatttccttctgtgtaaagtgtgtatggtagtctctgtctatatgctatttttaagtacttgcttatttatttttgtctgccttttgacagaagacctttttgaaaaccaagattaagtcaaagtggcatgtcaataaatttaaaggatgattttggtgataatgatgatgacaatgaggacatgccatggcatggttttatgatattgacttatagtcaaagcatgcaaaaaatcagaagttgagacagtccagcaagcatgggaggcttgaaagtcgcccacaaccagaaacagcaatggacaaaggccagtgcgacagagcttgaaggatcagtagctcttaagaatgaaggcaggtaaggagagaaggagtatcaggatgaggtgatttgagatagcaacactaggggataaggatgtacagtcaagccctatgcttcagcagagtctgcttttctttgtggattcctgctgggttctggagggcctgggctctcgggagtataattccagctacacgcagcctctgaagcttctttactccttagacagaatcagaggtgcagtaatatcaggagagtcttaaaatatgactcaatatttttttgccaaactgcctttgttccaactgctttcatgccttctgggacagaaaatcctgccaaaaagatacaaagtgtggtaggaagtttggggctgggtcaggagtaaaaagaagaagagtgcagagtaggggagagaaagaggagtgggtagggttccaaacatcttgctgtctgacatcccagagcaccacggccctatgatgccctacaaaagtggctcagatcttcaccagcagcactggcaacgtcctgagtgcccaagggagacaaaccctttcaccacagctgtaattactgcaccaggctccagttgtgcagggacaaataagcatgggctaagtggagcaggaggaggtcctggagaggcccaggatgaaagcatttagactgcaatggtgtgaagagcagaggtgagctgagcagagcttgttgggaaaaggaagagaattggaaaagcaggggactagtggctctgtttatatcaatgactttactaaatctttctcttaggaagcaaaatcatctaaggtatcattaaaaccaaactattttcagcaccccaggaggattactctcaccattaagggattctggagtgggaaaatttgatagaataagaaaaataacacaaggaaggggacaggaaaggaaaaacaaaagacaggcagaaaggacttcattgatctccttctttgattaaggaggcttcccactttgcaggctacaaggagggaaatagggtagggagagttgggctatactttaggtgttctgtgggagatcaaattccctcacctcctcactcaaccccagtccttgttattgtgtgagtcaatcacagccttcagctgtgaagcccaggttcgaagtgaaaatcaactgcttttacttcatgagatcacctcctcttgaccctattcatctccagtggaggttccctatccaaggctggaacatttgtgagactggagagcccactctagttaaaatcctctaagcaatgttagttggttttcttccccttttcctccttcttctgaatctcatacagagaaacagcttattaaccatgattactacctttaaactggggaggaatgatcttcttcacactaccatcatttctagagtcattcttcaacctcggacatgtgggagctaagacccagcatagttgaagtttatgatttcaggtgctcttggaagaaagcaggaagaaaagagcctgcagagacagggaaggtcaaaattctggtgtcacacagagaactggatggcgtaagatggtaagatcactcaccaatttgtaaaaatcaaattgtatctgttgaggtaagtcatcccaactcttgttatgcatcttcttggtaaaggcaatgagttttccagcacaagtcataggtctccagtaaaaaaaagtgattggacacgaattgaaaaatatcttccagatcacagatcaccgtgtctagaagcctaaactaggatagcctcactatttggttaaaacttaatataattaaaacgtcagcagtaagctcactcgtcatccagggctaatagttatagtgggggaaatggaagaaaaatgcttgggagataagtctgcaacttcctgcaggctcctaatacagctaggacttgaagtgccttctccaaacatccttcactctgtacatcagatttccccttcactgtacagacagagtgcttcctgcatctgggaacttgtctttgcaaatctccactgtcttccccttttttttctctggcacgctacaggatcgatatacgatggatacatgtgtgtgtacccattcaatagtcactttttgatcgcctgcaaaatgtaagtcatttgtgttcttctgaatatgtaagccccaggtaccatacctgctctcaaataacctaaggacagagagatgcaagggatactttctggccagggtggagcatatcatcccaaggaaaggttagtgaatcaattgatggaaacaaactaattgctcttcataaagtttttccagagtaatgagaggttgatcatgacagagaggctgagtttcagtcactcaaggtggtatcctcaacacctttctcatggtaggcatgcgtgcattaaataaacattgtgcgcttggtgcactcagtcggtgatgaccccctggtgttaattactctatgactcagacccacagccaaggtgtctttctcagactgactctagctgatttagatgtcgaacctcttctgctgcccacccagagttctaaatccagccacaagttcttcaacccatggtggagacagtgggcttgaaaagttaatcaatgactccaggccgccacctctctatctcttctacatatgaaagaggtcttttcacagctggttaggccccagtcaccttgtggtaccatgtacgtgtctccccattctacacggctctcagtttagagcagggattatgttctacttggctcagttagatactgccctctacatggcatgtgaatttaatcagagctactttggctctaagtgatggaaacctaatttaaaacagcttaagcaagaaaaggtgacttataggaattttaccctagggatgtagagatttttagaaagaagtataaatggctttgaaaagggaacaccaagggtggtaggtgcacagagctggacccagaggtctttcaaatgtactatcaagggtgctcatccaggagggaaggaggaaacaaacctttctaagattccttcaacatctggccagatgaaggagctcagtgtctaaattaaagtgcattatctccagaggtggctgcagtatgttagtatggaaccaggctgcttattattttctattgaagcccacattttttgttcagcagcaagagtcactgtggacccactgctgaggccaattagatctacagaacttgtaaagtcggtctcaattttatcagtgtctgactgatttcaatagcataatttgatatagcaattgcatagagaaggctttacaacatacagcaggcagcaatgggtgcctttccaattgtaattttacttttgagttagttgggcttttcatttgctatgatacatgttaatattcattctcatattataatgtagaaagtattcagaatagatactatcagaatccatcctccattcctccatatgtaaagcatattattactaattagtttctggtttctaggtggggaaatagacagaggtttagtcaactgcagatttacatagagaatgagtagatcagaaatgagatgttcttagttaaatccagacaatgaacatcttacttccaagctctcttacttgaaactcttttgctatttccaagtgctatcagaataaagacaaaacttttttaaaaaattattttctttactttaagttccaggatacatttgcagaacatgcagccttgttagataggtatacatgtgccatagttgtttgctgcgcctatcaacccatcacctaggttttaagacccgcatgcattagctatttatcttgatgctctccctcccattgcccccacccccgacaggccccagtgtgtgttgttcccttcactgtgcccatgtattctcattgttcaacacccacttatgagtgagaacatgcagtgtttggttttctgttcctgtgttagtttgctgaggatgatggcttccagcttcatccatgtccttgcaaaggacctaactctttaaagggctgtaggcaatctggtctatgagtatcccatctcaggccattgtctcacctgctttctatgcattcaagacacagctctttttaacttgaagagccagctccagcacacctcgggacatttggatgtgctgttccctgccttgaaggcttctactcagcccagcctcaatacatgcactcattccagttcccctcctccctgacttctgttaatcttcaggtgtctgttcaaatgtcactatctcagggaaaagttaccctaggctataccacactttttcccatcctcacagcagctaccacactgtgagatgccatggccttgatcacctgataaatagctatctctcccactagaccataggctccagaccggcaggaacaacgtctatcttacacatcattgttgctaaagggaaagcaaatagtcttaatgcattaaatgagtgaatgaatgagggcataagagacaaagatagacagctttacaacagacggtaggcaggatttccagttccaattttacatttaagttagttgggtttttcactagatatgatacaagtgatatccattctcatatttattctctaaaatgcccagtgaagaatctaagcatcatttctgtgcaagcctaatttccagctgtcccatttctgacatgcatagtttctcaattcagtgtgaggagtattaagtagaaagtgtggtcacctatcaagaaccacagcttaaagacatcataattgtttgttgtaagatgtgttaattcacctgggactttagaaagagaaccctaggtaattactacttatttcttagtgagggttttccaccttggggagggaaggtgggggtcaatgtgaaggcattatgaatctacatttctgagacttccagtgttaggttagcactccggagtttgggtcagggccatcagctgcacagtgacgcttgctgaaggcatccctctgctaggatagattgctctgccatcctcccgcttgcacaaaagaacttcagcctcccaagaaggagattctcaggaatttatgactcaatcaactcacccaaaaggagcataaatgggattagttttaatattgttaagttgcaaaaatacaggcatatgtgcatgccaaagcgaaaatgtacgcaagcaaagggggaaaacatatgggtacccatatggcgaaaagcacattgctagaccttcacacacttctcatttacaacaagaaccaaagttagtgaacataaatttgctttgcaaaaatgtgagaggaacagcttgtttgcccataactgttccactgagcaagatatgtataaccttgatttctcatctcagacacctctttctcacactccagggattaattaggctctaaacatgacttcagattagaaacaaggctcctagctgccttggagagagacaaagaagtagtagcaagactggatgatgcagcaggtcaactaataggcaattcctattagtggctggaactgttacctgggatggcttagaagagaaatgacgttgggaagtctcagcaggtttattttaattgacacagaggaacaacagggacctacagcggacaatggcatgaatgtggctttgatttggaggctgtgcttttgttagaacaatactgagtggaagctagaaagagactagacataggaaggtaggtgtggacttaggaaaggcaaggcaagagtatgggtgatgttcaaagctagtgagcacccttgggtgccccagataacaagcagaatttgattcaatatatcattttacattatacctattccaacctcaagctatggaagccatctttgtataatataaagagctccagacttgaaaatcaggaactaggttcttttcataaagctaccattttagttagctgtgattcatttgtcattacttaacctttccatctgtttccctccctgtgaaatagacaaattattctttctctgacctattttagggagctgctataaacccacttgagatgattcatgtgaaaatattttagaaacaacaaattcttatataagcatatataggaataggttgttaatggaatactagagactcattttccttgtatttctatttttttaattgtttcattggaaataattgtcgatccacaggaagttgcaaaaatggtagagataggtacccagtactatcacccatctcccccaatggtgtcatcttatgtaactaaatatatatgtgtgtgtgtgtgtgtgtgtgtgtgtgtatgcatatagtattatatataaagttgtatttataaagttgtatgtgacacattttctttatccagtctatcattgatgggcatttgggttggttccaagtctttgctattgtaaatagtgctgcaataaacatatgtgtggatgtgtctttatagtagaatgatttataatcctttaggtatataccaaataccattacccagtaatgagattgctgggtcaaatggtattcctggttccagatccttgaggaatcgccatggtcttccacaatggttgaactaattaatactcccaccaacagtgtgaaagcattcctatttctccacaaccattcattgtttcctgaatttttaataattgccattctgactggcatgagatggtatctcattgtgattttgatttgcatttctctagtgatctgtgatgatgagctttttttcatgttttttggccacataaatgtcttcttttcagaagtatctgttcatatcctttgcccactttttgataggactgtttttttatcttgtaaatttctttaagttccttatagattcctgatatttgatctttgtcagatgagtagattgcaaaaagtttctcccattctgtagattgcctgttcactctgatgctggtttattttgctgtgcagaagctctttagtttaattagatcccatttgtcaattttggcttttctttcaattgcttttggtgttttagtacaccacagaatactatgcagccataaaaaagaatgagatcatgtcctttgcagggacatggatgaagctggaagccatcattctcagcaaactaacacaggaacagaaaaccaaatactgcatgttctctggacacagggaggagaacaatacacactggggcttgtcggggtgtgagggggaaggggagcgtgagcattaagacaaatacctaatgcatgctgggctcaaaacctagatgatgggttgataggtgcagcaaaccaccatggcacaagtatacctatgtaacaaacctgcacatcctgcacattccagaacttaaagtaaattaaaattaaaattaaaaattaaaaataaataaagttatgaataattgcactgtggagtttacttggatttcactagtttttgcatgtacttatttttatgtctttgtgtatagttcggcaacattcagtcacacatatagagtcatataggtaccataacaatcaagatacagtacagctccatcaacccaaggcaactgccttctgcttccctttccttttgccactctcaccactggcaactgctggcctgttgtgcatatttacaattttgacaactcaagaatgttataaaagtgtaatcatacaatatgcaaccttttgagaccaactcttcttattcatcacaatgcctttcaggtccatccaagttgtcaaatgtaacaatagttcattcctttgtattgctgtgtagtatttcatggtgtgattgtaccacagtttaaccatatacccaatgaaggacatttgcctttttgcctatcacaaataaaactgctatatcattcccactctacactcaggccaaagaaatgaatcaaagacctctggactgtcaaggaataagagacaaagacaagaggtaataaaatagtaaaaattatcacttttctcccaaggctgctggcacattcaatgagttaaaacacaaaaaatgtacaaaacagggctgggcatgcagtatgcactcatcataataccatcataacaagtacccaggctatctgtatgctacatggattcaaagaatgcattcaaatgcaaatatggcacaactacagttcagaaataactgttgagttaggattcaacactattacctgctttccattcattctctcttttgattcctaaaataaactgataaagttgttcccattttgcagtaaagggttttgaggatcagtgagataaatcgacatttcgaaagtcactcagggcgttaacaactcagtccagatctcatgcttaggttgataagactctgaagtccatgttctgccaatgggctaacaccaccatccaacagggatcgatacctatacacaagtgcgggtcagtgcatcttttatttggagtgctaagaacttggtgattccttctaaaactttctctttaggaatttctagcatgaaaaatgaacgctgtagcagaaacagtcatggatcagtacttttttgtttgagacagagtttcgcttttatcacccgggttgcagtgaaatggcctgatctcggctcactgcaacctccgcctcctgggttcaagcgattctcctgcgtcagcctcctgagcagttgcaactacaggcgtggttgtagagatggggtttcaccctgctggccaagctgatcttgaactcctgacctcaggtgatccgcccatctcagcctcccaaagtgctctgattaaaggcatgagccaccgcgctcagctgatcagtacatttctaacctgaacatctaccagagtgactagaagacaaaactgcctaaccaggtgataaccataggtggtgattttgctagtattagctctttacttccatggaattcactcatttatcatcctcatatatctagaacaaagccaaacattatttcccccagacaggtgtcatcagtgccattgatcacattcctgaaagctaatgccctatactcagagaaggccctttcccaccactagttcttatttaggactaatcaacttagttttatggattcttgctcaagacaaattagaagcagatcagaagaaatgcggctgctaaaagacaggtgcactgactttaggaagaactgacaagtctgattgaatggaagaaagaaaaaatacagtagctatttttaaaaagacacaagaatttaaacagtattgacagtattaaagggtcatattcctagttatcccagtccccaaatgccaagatacaatcgatatgtataatcttgatgttacaatataaagatgaggctaaatggcattcactagacacaaatacacaaagtacaacctaattcatgttttaaatgctttcattagaaataacttgagtaaatgcataaaagagtcagctttggttacctggaaaattcacttgtatgaaatagctcatgcacttgctccctgagatgttactgtatctgagtagactccatgagcaactcataggtgaagagttgtcatcttaaaatctcagtggaggggagacaggaaggaagcctttgttatttttcccaaacatctagcctttccaaatatgtcatggcaatggagccaggtgtgtgaggcatcgcagtggacgactatggcattgcaagaggggacgactaccctccttagaacacaacagactccaggatcttctgccactcccatccctgcaactttttcacattactcatgtgcctagaagagcctgccagtttatgctggcccagcttcccttctcttgtctttcaggaacgggaaaggaagtaattcttgaagtgcagctgattcacaatgtattccaatacaccttgcttgcttgttttgggacctgactttttcctttggaaaattatttgaggcagcagcctgtgtgattccatcatcatcctacttcctgggccatgggtcactaagtacagatttccatatgtgtgaaggctgctacacaagtaccataccctctagcagatctatataaatatttttaataagccattggctgctattgaaaaaattaagtatagatttttgtatctaaagatcaagaatgaatacacagtcaaaagttcagcagtttgcatagaaacagcaaaaccccaaagggacgtttgcatagtgcttttcgttatgttcacaacacttaatcatgatcctggtaacatccagctttcctcaaaagtgaggcatgtgtcctcagaaaatgcccaggttctgggaatcctggtacactttaagtactgccaaggagatgagaggtcgacagggctccagcagcttacgcagtctacagagtagaaaagctgggatgtcttgggatccacctttggaaacttggggatgcttcaaaacttttaccctcctttggtaagaaggatatgtctttggtttgtttgtttttgtgaaacaaatatacctgaaaagcaaagttacttcaaaggggttccccagaaacatcaatgatgggagtatttacaccaccaacatgggcagaggctacccagactcctctcattcccttgcctcctcccactccaatcaactttactcacttaccagtgcagcactacctgaaaccttcactcttcaaccattatcatctcaggtagagatcgcatttctgtattttgagctgtattttttccttcattatatctgtctactttttatatttcagagaatcctcatagtttctgatccatcaaagcttactattatttttctccaatgtgataatggatttatttattcatttatttttacctcttttctgtaattgtaaggggtgaacagcatgtactcatattgccatcttaaactgtaagtgtgattgttactatttttaatttttaataactgctcattaaaatatttttcttaaatgaaggctgatttacttgtccctgtttatagatccccaaatttaaatcatatatttcaaatattgcattagctaactcctccaccataatcctactggaatttgaaagaaaatgtcattgcaacctttatttcttattcttccatgttgaatccatcaacaaatttttccaaaaaaatgctgtttgatgttcaagttttattgaatgtacttctaatcttttagaacaactccctaattgcaagtgagaaggagcatccttctgaaaataaatattggcagtcaccctgcagatgcaaattttaaacttacaaatacttcatgttccagagcttttcttttttattattatattttaagttctgggatacatgtgcagaacatgcagttttgttacataggtatacacgtgccatggtggtttgctgcacccatcaacccgtcacctacattaggtataaaattggaacgatacagagaagattagcatggcccgtgcgcttttcaaaggaaacaattttttggagttcaaatgcttaaatgtcattgagagagggaagggggaagacaatagtgaaaattaaggataacaaagttaaggccaagcctatgagaaaacaaaggcaacttcaaagtacagcacagcctgtgagatttaaagaagagagggatcatttaaatttaggattttccagtgaggctaaattgcaactattacactctgtaaaagattgggaatatgaatgaatctcccttattttaaaaggaaaatcttaccagtgtaccattataatgaattgtttcaggacatttacacaaagttaaaatgccttttaaatgatttccaagcttagagaactgtgtgtttaggatcaaataactacattctgggatttcaagcatttataaagacatttgattttaccaaatatataaaagttagacatagttttgtatataatataaatccaaaattatctctaactttaggcaaaattatcatggaacccatgtcttggggaacattattgctctgtttatattaaatttgagttttgcgatatcccttacatatactttaatactctcattaattttactttatgatatagagacattctaggttttaatagctgaggtctttataccaagaatattaggctaatttattagcattatctttccctataacaaggcaggagcaaaaatacgtgttctcagtccacaaagtaaaaagcagcaaaagattgaatgatgctcctggtaaaagatccagtctcttatttgataagtgcaatgacataaataatgttccaaattaagaaaaaaattcagatcattattgtctacatttcggtatatttatacttcaaatttaattgcaatataattacctacaataaaatgcacttttttttacagttttattagttttgactaattttgacaccaacataaccttcaagatacagaacttttccaacatcccccagaatttcttgtggccctttgccgtcacttctcccctaatccctaccctaggtaaccactgacttgacttctgccattctagattagtttttcctattataggatttcatgcaaacaaattcatacagcatgtattttttaatttttagcttaacttcctcagcatgccgtttttgagatttatccattttgttatgtgcaccagtggtttgttcctgttaattgctgagtagcaatctgttgttagaatattccacaattaatctatttgcctgtcaatggttatttgggttattcgtcgtttacagctattattaatgaagctgctaaaaacatttgtgtacaatgtacatttgtgagcatatgctttcatttatcttgaataaatgcctaggagtggaattgctgggtcgtacgctaagtgtatgtttaactttataacaaaatgtgaaattgtttcctatagggcttatatgttttcacagttgcagagttaatatataaagcttcagttgatccacatcctcaccaacactcgatattatcagcctttataattttagtcttcctagggattatataacggtatctcatcttggtttgatttttatttatatgatgaagatgttagtcatatttttgtgtacttatttgccattcatatactgtatcttcttttggaattgcccattttttttttcagtttgaagtggagtgttagaattgtgttggaagaattcttcatatacactagatgtaaattttttgtcaaatatatgtacaagaaatgtttttatccagtctgtgtctccaccgaaggtttttaattttgatgaaggctatgacgagttaagttacaagcctataaaaatgataccttgaattcctaacccctgattcctcagaatgtgaccttatttaggaatagggtctttacagaggtaatcaagttaaaacgaagttactcgtgtggacactgatatattatggcttatatccttattaaaaggaacaacttggacacagatgcatctaggaagagggccatgtgaagatgaaggcagagatcagggtaatatatttacaagtcaagcaatgccagtgattaccagcaaaccatcagcatctaggggaaagacgtggaatggattctccctcagactcttgaaaggaaccaaccctgctgattccttgatctcagacatctagcctccagagaagtgaggagataaatttctgttatttaaatcacacagttttgagtatttcagtattaatatgaatttatcacttttcttctgttacggttagggcttttcttgtcctggcaaagctttgtctttctcaatattactaagatttactcttaaactttcttgtagatcaatattatttttgaatgttatgtagccatattccatacatttttcctgcttacttggtttcatgtttgaatgtttaatgcctgaggaagctcttgtttcttgtataattcctagacttaatcacagcttttagtaacagtgtaaatatttcaagtggctctgtgcccacctcttcaagtttgacttggggcaagttttatttccaagagggcaagccccactgtccttctggttcccttgctattaagttggaaatggttttaactgatgttttcataccaattattgaatgctcagcacagtcatgcccaaatgcacttaaccatttccatcatccttcttccactcaaggtgaactatttatggacatgtcagacatgtgtggctctggataaatgtcctaaaagtgctgaagcaaggagatccttttactcctggacgcacaataatgccaaagttctccatggccacgctaatactcttgcactctacttccaggaagaacaaaccaccaactgacccacctctactttcagaaattcacatcttcattggaagttattcttatgtcctttgttcttcatagtttggaaaacaaaagccatctaaggccataaaaatgactgacaccatcatttagcaaatttcctctatgaatccttcttttgaaatgaaatagccagcaattggtgcatattgcctgtttgattttctatgactggattacaaaatgttttctgattcctgaagctctgttgtgcataagagccaagactttaacatactacctctgaaaacgtcctccaggtcagcaccttacccttgactgacaggtgtctccatgtcacagttggctctggtctgccaatagcaagacacagcagggtcacactgcttccctcattcacagtgatgtctgaggagatattcatgatctgaggaggaactgtaaggaaacaggatagaagaaatacctgagaataattctttgcacttaaaaggaggtgttagcctacaaatttttgtatagcatgtttttataataaatattgtttgcagtaataaatttcaagttgcttgatttgccaaggatatggccatatacatttaccttgtatttatggtagaaggagctctatattataccttggcgatagcaggaggcagatgtgggaagagcggtgggaagcagaggaattgagagatggtgtgactgttgattgaaaggcaaaatcaaaaatattcacaaagccttccaagagctcctgtttatccccatgtctactgtttttagtggaatcagtggcataagctgataaccattagggagccctgtcctcagcctcaagccttccccaacattgcactcaaaatgctgataacgctgagttagttactattttctgagtatcccagacccttttaaaatctttgaccttgaacaggttgttccattgtggaactcttttatttctcacttattttaacctgaaaatccccaatcatcccttaagacacatcctttaaaactcagtgaaattttctgactctcttgatagagttggaaaatcctggatccaaccagcaatgtgtgggtgtccttactgttactgtaaccatgagattgtactccaaattgtattttttaaatggcatcatatcctactggttaggagcagggctctggattcagatagaccagtgttttaatcagtttaattcctcacctgctacatgaccgttagcaaggtgacctgcctttgtccctttgagctttattcttctcactcaggaaatgtggatgataatggtagctaaactcactgtattgtgaggtttaggtgaaataatggcttagcagagtgactgatataaagtaagcactcaataaatgttagctcctaagatgatgatgacaatgatcatgatgatgacagaaaaaacatatttcacaaacaacagttttcctctcatgggccaggaccatgcccatgtacccacagcactacaaagcctaaaatgacacttggtcttactctctcacctccaggccttgatgctcttcaacttaaaggtcagtattggaaaactcctagattccttctcacctcttatttatcatcaccactgtcctggttgtttctcaccaattttcacggagataattgcaatagcctcccaccgtgaaccttccacctggtctctttccattttggggtccctccaatctattccctacatgtaaccagagcagtctttccaagtaatcatggaagcaaactgctgtcctccttactccttcaccccagaatggcctaccatgtttgacaaacaaacccttctgcatgacctgagctctctggagtcgaacgcccaaaaccaccgatgaacctcatctcaggccccgtttcctctaacacagcacatggcacacactctaccaggtttaacaagcaaacaaacccttctgcatgacctgagctctctggagtcgaacccccaaacccactgacaaacctcatctcaggccctgtttcctctaacacagtacatggcacacactggccccttgtcctctcccaaatattttaaaagcatcagcactcctataacttttctattccttgactgtcttttcttgattccctacctgaacagatatgactcatctttcaaagggtaccccaacatcctctctcctctgccatttgccctgacctctccccacatcctgaaagcagaagcagccatctcttctgctgcattttgtttagacctgtctcaggaagggtattgaacatgctctgtgtatggcagtttattgtcttctgactgtctttgcacctagaggatgaggagctggagggcaagtgtggaatcacacacatctctactcctcagtgtaaatcacacaggctgacaatggtacatgcttaatttctctttgaaagaaagatccaaaacagattgaaaagaagtcccaaaactaagggaggtaaagctttgaatggaagactttagatactcaaacctttctttctaattttctttcagatcctcaaataaaaggaagataacacagagagtggaggctccaagcctgcagacatgctgatttatttgtactgccaatttaattgtgaattattaattaccaaacaggtacagtgcaagtcaattccaaaccaacctgagttgatgtcaaaggagaattatggcaaatgctgaattcagacgattttgcagcttggagttttacgctgctgagaccttacaggtaagtcttttcaaggagaagccaagagtaaaaagtagaacatttgagctcttaagggaatctacattagcaaataaataaaaattgcctagcttataaatctgccatatttgggattatttctgcattaggatttggcctgaaatttcagtgcacatattttacccaaatacatgctgggaaaaaaatagtgtacattctagctacactgcattctcttgagaaacatgttctacccgttttttttttttcctatattttctagcttgttaaaaaatagttctgggcttagaaatgtcaatacttttttcacttctgtaaagcaacaactcgagtgcaacttccaaaatattctcagaataacgtcgcttcagctggaagtgttcggccatctgaagttttttgtcttaattttttttcagatcctagaggctccctgatagtaagttacacacagctggggaaagcacagtcagtgaatggagacagctatggtgcctcaggatagaactcagcacagccaccaactcagaactgttctttccacagacatcgtatctcatgcgatagtgtgaaggatgctggattaagagatatgtaaaattccatggatgcttagcatgtcatcctcattgctcaggcgctcagtcaatgtcacccattaggaaagagcttcctgaagtgggatcgcgaagactaaccaagatgttccctctaagcccaggtagtgttgtctgctttcctctgtagctccgtcatgttctctgtcattgtctccaaggaggaaagataagtacagttttagggtgtggatcgccagcagaaaaggaagtgcagaggatgaattggcagaaagggaagttcttttcttcttaattatgatatccttagaaactaacattaatatgcaactttgttgttttcaaattgcttgtttatggagagaagatccttacaaatggtgagataaatagaataaatattctcactattaatattgaagaaactgaggcatggggagataaatggatcaaaattacagggttagtaaatgagagctcatctcactgcattatgattcctctttgtttattgttgatcaattccccaaacacagtatttccatccagaagcgttcatgcatttgtgtgctctgcttcaaatgccttcccagagcatctcccctcccagtacctgccatgaggaacaaaaccatcccattcaagtcagcgccccttgcacactgcggaccacaacaggagaagcccatcttcaccgtccttgtttccccagggccatgcatgctgcttgccaaggaaggtattcaatacttttaacgtaaatttaaatctgaattgaattggcaatatcactacaactccacccttgtttccatgatgactttgtgaagaaaggaacacttggggatagcttttaagtgcttctccgtattttggcagatctttgtttaatttttagacaagtatctgtagcaaatgaatctatacatattgctactgcttgtaaatatacacataaacattaagaaatgaataataaccttatctgaaatgcccaaattactcaaagaaaatgataagacccacagagtttaactaaaggataataagtagcacagtgtgttatctgtgcagacgctattgagccttccctgctggtgctgcaggtatctgcttatctttcactgatggtggtgttttacaatagggcctttgcatagattgtgcagagggttcaatgcacaactacggtaacttcaaaatgtggtcattttggatagatgacagatgggtaatagctaggcagaagaaagatcaatatagatagaaatatagcaagacagatgatacattgacagaggttgggtaagtaggtgggtagctagaaagagatagatgatagatagataaacggacagatagacggatagacaaatagatgaccaatagacagaggtagaaataccacagttatcttttaaatatcttgcttctgcctaaaacctccaacatctgccccttgctaaagacggaaggtctaaaacttcttagcaggatttacaaaaccatttgttttgcagtctgtccaaaacataacttctaggcccttctctaaagcctctccccagagctccatcaccctctcagctttgtacctttacttgtatatttacctgtacctttatttgtacctttaattgtacatacaattccctctgcttggaaaacccattcccacacctatgccatctgatccacccactctccagttctcaactcacattcagagcttatttgtgatgcctgaattgctctttctcttcttcccaagacaatcttgtttatgcctttatcacaccatttatctttgcaactgagctatcccatggacaagatctgtgataggtatcctcacattcctattatacacacaatgactgacatgcagtaacatcttctttatccctataaacataatgtatgagtgcatgggtttctaaattcagcatcttttaatgtgtcaagtgtttcccatcctagagattgacatttgctctatcctctccctgaaatcctcaccatcctattcttcacatgtgtaatttttttttctgggctcagttttaatgtcacgtcctcagagaagtctttgctaatgaccccagtctcccaccctcaataactacttcaggtcctcttgttacaatctctcctcaacctttacattttcttgtataaaacatacatagttttgtgcttttatatccatttatatgattatttgtttaacatctctctggcccactaaactatctgctttataaaccactacactcccagtaattagaactgtgcttgccacataatatttaatagatgcttaataaaaacttgttaaataaataaatgactactctgtatactgttttactcaaacgattgtgtacttgtgagagagaagacttgagctggaaaaggctttcccaaagatgaaacatgtctttctgtaaagttagttgggattgaaatgtgtgattttgcacatatcagccccaccctgcataaagttgatatgatgtggtggaaacggaagtgagaggccagggaacatgcctccagttctgaagtccaatagacctgcttggcattggacaacttttatttactgagtctaagcccatggctcctcatctgtacaatggggatgaaaaacttgtctcttcaggttgttgcaagaactaaatataaatgtattcaacagaggagcacagtgcctggaaataagtgagtacctggtaaatgttagctgttattagcctttgtatatactcattgttgatattgttcatgccatttagaatcagagaaatggcttaatctgtgcctaattgctcatttcctaaatcttagtttccaactttaagttgggacttataaataaataaagcttaccttggagatatacacacacacatatatatatatatttaaatacattatatgatatgttatatataataatatggtataatatattgtatattatatttaataatatagtataacattactatatatttcatatctacatagagtatatgtagagtatgtatgtgcataaacactctagctaccagagtaaaaagtgcataaactctctagctaccagagtaaaaagtgcatattcaataactaaccatcaatttcctcctcttaaactgagctattgggcctaagcaaatgcacagggaaaatctcacatgtgtatgaagaaattggcttttaaaatgttttcttttagggggtgtctgtttctagaaggaacagggtacaggacatcagcaccatgtcctgcccagccaggacccagacctcatctcagctgagaggcagaagaaaagtgggcctgggaccagatgcagaggtggctgctgctgctccctacctcagccttgcccacacccttagcaatgcaataagtaatgatacctcgtatgtgatgggtgtttggggctttattatctaatttgttcttgacaacagctctgaggtagacaggacaagataaaggaactgacgtgtgcccataagacaggatgctgggacacagtcttaaccctcagggccagacccagtgagaggggttcaggtcaccaggacagcactggccttggggtcacacagctccagactctggtcctggcctctcttcagctggatgcctgtgtgcaggtgagttctggatcttgcggtttcctcccctaggaggagtgttcatgacacctgcttatggtttgggtgaaggtatgggtaaaactctgagctcaatccttggccaaaagtaggtgcttattgaaggctgcttcctcattctctccacattgtcaagaactcccacgttgtcaagaactctctgggaatttttttttaattgcagattattagagctgaatcagaacaggaagcaatagtgtcagaaagtcctcaaggtgaatttggcatgcagccaagattaggagtcattgctacacccccgcaaggggcacctgttctgtctggtcctctcccagtcacccagagctgcccagcttccattacatccctcagcatcctgtccctccagggcctgctctccattagagatggctccacaaggtaactgcaagggcagcctttccctccatcacaactctgccctgtctctgaccagtcacaatatttggttgtctagttttaactgttttatttaagactgtatgtcagagttagaaaaagaaatcttgggatttggagtcacaggggctaaggtttgaacacaatttttttcctactattttctgtgtgatttttgtacacaagccattaagtttcagcttcctctactgtgaaatgggcataaaaatatttgcatcacagagatatggagattagattagtgataattatttcaaaatggcttaaaaatctattattattgtttttactttattgttgttattattatcagggaataacaaaatattaagagaccatgtgaaagctaatataaatgtgaaatacttttcattacagttttaaacactcaaggctattttacaaaaataataccgaaaagacttttaaggatccaatgttttatccttctggggctacctttttgcattttaatagaaatgtttatttcttaaaccagaagcaaattgagaattatggcatttatctaggctaggttatgtgatattctgtatactcaaatagtataatattttgcaaaaagcactgcatgaagtgtaaggaggagcagattctgaatattttccttctgtagctctgtgacatttttctaatcatttaatgtatctggctagagctgtatgtgcacttgtgtgctcatatgtttgtgtgtgtgcattgttgttaatttgttttggttaattttagaatggaggcattggattgtaaatccccaggtctgttctggtctaaaaccctgggagccgatggtctttcagcaacaagttgggtcttatcagtgagctcctcctgggaacagagtaataacaccaccagcagcaacaacaaaatagttcatgtttatttcttgaagcctagcattaagtgctgtatatacattgcttcctttaattcccaacacattcttagaaaatatgcacaattaaaaatcagcataaggataggcatatacatcaatggaatagaattgagaatccaaaaatatatccacattttatggtcagttcatttccaacaaggtgccaagtcaattcaatgaggaatgaatagtgttttcaatgaatggtactgagacaagtggctatccccttgcaagacagtgaagttggacccctacttcataccatatacaaaaattaactcaaaacattaatagatcaaagacctaaatgtaagggctaaaacttagaagaaaacacaagaaaaactatgtagcctttgattaggtgatgaatccttagctataccacaagaagcacaagcaacagcagaaaaaatagataaaccggacttcattcaaattaaaagtgtttgtgcttcaaaacacactatcaagcaagtgaaaagaaaatccacaaaataagacaaagtatttgaaaatcatatatctaataacggactactgtcaaaatatgtaaaagcaataaaatgtcaaataatccaatttaaaaatgaacaaaggagttgcataaataattctccaaagaagatatactaatcgccaataagcacataagaagatgtttagcaccattatttaccagaaaaatgcaaatcaaaaccacaatgagatatcacttcacacccactatgatgactttaatcaaaaagagagacaaaaacaagtttggcaaggatgtggagaattaatagactaatacagttggtgggaatgtaaaacagcacagccaccttggaggacagtctgtaagttcttcaaaaggctaaatataaagtatcctatggatcagcaattctactctagctatatacctatgagaaatgaaggcatatacccacacaacagcttgtgcatgaatgtttgaggcagcattggtcataatagacaaaattttaaaacaagtcaaatatctatcaagagatgaatggataaacaaaatgtgatacaccaatacaatggaatattatataagcatacaaagaaacaaagtactgatatatgacccaatgtgaatgaaccatgaaaatactaagtgaaagaagcgaaacacaaaagaccacatattgtatgattccattcatgtaggatatccagaatagtaaaatccataaagataaaaaatgcattggtggttgccaggagctagggagagagataaatgagaagtgactattgatggaggtggagcttcctattggaattataaagatattctagaattagatagtggtgactagtgtacaacctgtgcatattctaaaagctctgaactgttctcttaataaaggactaattttatagtacgtgaattgtatctgcataaaacgtttataaaaacatcaatcacggccaatcatctcttatgaggtcttgtattacaaggagagacgacaccccaacacatgtgacttctcagaaaatattcttttcatttattgatagttctttgaataatgctgcataatgtctgcttaactccccatttctcattacttgcccactgtttcctcttttctttccaagacaactcgcattgccctagtcacatcagcccatttggcaatgttccaaatacctcatgttaattcatgattccacacttttgcatgtgctgttccttctgcccatgtgccatattccccattcatccatatgctgaactcttactcatacttgaaaactggtattgagatagaataccttctctccatcagttccctcattctacagataaatgtatgtctgtgttccatgacaacatatgtataacgatgtaatatattcattgaaaacattttttgagttcccactatgagccagacgttacattggaggtagaatagcaaatagacaaggtccttttctcatgtaaattatggagcttagtgtatagaggagaacactgacgctgaaaagtcatcatgagaatctatgtgtgatttcactctggctatgctatgaagtggtgcaaagctccatgatagcccatactagggattttttactggtcagtgagtttggtgaagggtttgttgtgggcagagctgggcagatggatcagcctgtgcaaaggatctacaaaacagagagcatgatgagcttcagtgactgtggatgaagtgaaaatagtgaatctcaggaactaaggctgaaagcgcaggtagagcccagaacttacagattctttgaataaaccctgagattttcaatctttttgtaacagcagttgggctatacattaaaatgtttaaagacatgctgctgctgctgctgctgctgatgatgatgatgatgaagatcatggtactgatgataaaggtggtgataaacatagtgatggtgatagatgatgatggtgatagtgataataacggtgatgatgatgatgacaaagatggtaaagatagtgatggtgattatggtgatggtggtaatggtgatgttgatgataatggttatggtgatgatgatggtgataatgatggtgatggtgatgataatggtgatgatgataacgacagtgatgacaatagtaatgacggtaatgatgatggtgatagatgctgacggtgatgatgatgttgagggtaataagggtggtgaagatagtgatggtgatcatggtgatgatggtggtggtgatggtaatgctgatgatgacgatagtggtgatgttggtgatgatgattgtggtagtgatgatgatgatgatgataatgatgataatggcaagtgatgcaggcatgacacatttccactgggaattgttcactcctggctgcagtgtggagaatagactgaagttgagcaagtgaaaatgaaactggctagggagttgtccaaaagtgaaatggcagaaggttagacaagtgcagtaataggagagagatgagctgaaagagagagatttgagtgacatttgggagtaaaataaacagagcttggtgaatggcaggatatgtggttagtgtcacagcacttttcacactgttctattgttttctatgtctctctcactcactcgaccggggatccttataattaaggactgtcatttgttcatctcagtattccaggtgcctctcagcacaatgcctggtatctggtaggtgctcaatcaatatgtgctaaatgtaattgctaatgccaggagattttcagaaaaatacaacctctcaggatccagtggggcagccagcaaattggaactaggtgagttgtgtgaagtcacatccaattatttgaggcagggccagatccatgttatttggtcttatatactctgagtgtgaatgagactccctccatgtcctggtgtgatatggttttatttttgtgctgcagatagacccagtccattctgattgctattctcctctgggctctattttgatgagagaaatgatagggaatgagaacaaatggttctgaataacacatacatgaatacatgccaggggctgggtgacatcacaaacctctcaggctatgctaagttcatttgtgatggttgtctccacagtgtctcttacagaagttatttatagactcagacacacacttcctatttttaatttgcacaattcagacaactgaccatgatcagaggaactgaatgcagcaaaagagtctttcttgtcgagttctcttctttctggagcatggaggtgccctccctctgggagtctccttttgttcctttcccccccgacttgtaggctccctggagagttcttctggccacacacacacttaggatcacagggtttaatttacatcacagaattttcaagtcaaaatagacgttagggatgcccctcgctctaccttcccattttgcccatgaggaagtactttggttccagtcccagttctgtcaagcatttgctgtgaggtggtggccaagcccatgacctctgtcaatccaagtctctctctcacaggaaggccccctgagtatttccggccttcctggagcgagtttcagacctctctctttctctaccttcctctttaacatggtcatggcagtctcttgttacaacaacctgagctccctccctcttattcacagtgtgaccttgagcaagttgtgtgacttctctaatctcagtttctcaaactgcagaacagcatagtgatcataagtaacttatagggtcattgggaggaataaatgataaatgaatataaaagggtttttgtcacagtgtctggcacatagtaaatgccaatgttatgggctctttattctatatccagattttttttttttttttgccagcaactctcatttattgagaacttaataagtgtcaagtgacactgtgcaaagtttgccacacatcacttatttcatcttatggaaaccctacatggcagttttactactactttacattttaaggattaggtactagaagcagagaggggttaaataacttgctaaatttcacacagcctggaagaggagaggctgagatgtgtctcccattgactgactgcagaacccaaggtttcagctacagccagcccacagcttgaggtgatccaatgtgcctggcttcaaaggccagcatctctccactcttgctggcagggcttttggtttggacacagtgagatgggtagaagagaagtcttgcaaggtttggaacagaagtggccctcactttgatgatctgagaagtaggtcataccaaaagcacctgttgcactgagtaggaggaaaaccaaatgaggcaatgcaggggaagtccagcatcttctcattctctgctttaattcctagacctgtcatttagtgatccttggttacagatgatcagtgcggagtgtgagcagggacattcctggcccagatcaaccagcctgtactcctcagcttctcaccaatggtccctgatgcctccagtcttccgcctcagtcctgtcacattttaagccactcctggctggggaaggcagacgtggaaagatgcctgggctgagaattaggccagatgcatccacacctaggatttcatgcccctccttgtctccatcagctcctggccttcctgattttgtcactgtccagcagatctttctgctgtggctttctgaaactacttttgcatgtccatcttgtcccccatcctaaatctttgaggggaaatgtggtttcttccatgacccttcttctaagtttattctagaaccctgcatagcacccagtctctatccaggtctggagcacagcctttggaagccacatcagcaggacagattcacccaacctctctgagcctccttggtttgctccatattgcaacctggcacctggcgacttgggagtattgacagactcctgccctgctctgcaccatgaacatccaccctcaccccccacacccagagctttccaatgatgaatgggctgcaggtctctgttgtgttttgctcacatgagtagcaatgctggggcccagggggtgtctcaactgagctggctgccccttgggatgcagcctcaccctcaggccatctatctggaatcagcctaggtacacttcccagtaaatttcctgcctgtgactgaacacccacgcctcttcccttctcccaccagctttgtgctgccaagattagatcactgtgcctcacccctgcacccaagttgtggtcattgtgtgttcaagtctgcgacagaattgaagaaggaaattctctgggaacagatacagaaactctttatcttgggaggaagatgggatttggaaaatgtttaagaaatgggcagttgtccatcatcttgtctattgtgggaagaggggaaagggtctgagctcagggatcattcttccattgggtaattttattaaaataagcagtatttggtggcatgcagatgatagagctatcttcagaaggttctagctgtgaataaatgatatgataaaagtaaatataatttttaaactataaaatggtatagaaccaggagtggtggctcacacatgtaatcccaacactttcagaggctaatgtggaaggattgcttgagaccaggagttttagaccagcctgggcaatgtagcaagtccctgtctctttaaaatgcacacacacacagccaggcatggtggcatgcgcttatagtcctgattactcgggagactgaggcaggagaactgcttgaacccaagagttcaaggctatggttagctgtgattgtgccactgtactccagcctggagtacggtgtctccaagtgtctctaaaaaagaaaaaaaattaaacaaaaataaaaacaaaaaaatagtatagaatagaccattaatttagtatttccactaaaaaaaattaaaaactacattttgagttcttagggattccactggttctaaacacaataggttttgactctgttctctgtggaccagggcttgggtgtagcatacacagtaatggttctttataatatagaaagtacaacacataagccaagtttagccatatataccgccacgttttttcccccactcactatcatgctggatccacaaaagacattacttataattcttggatttctaagcatgaagaagtcagcaattagcttcccaaataattattatataagccttttttcaaatctttaaaaccttcctcaattccaacaaacctggagagtctggaaatgaggattatatccacattttcttactcttgaaaaaggcaggggggtctgtgactgaatattgctgataaaaacatgataactgagtctcattacagccaaagacaagtctcatattttagcatttttattaaagctttttaaattactgagtgtctggtatattcaataccggcctaagtgatttatattagtctatccctagatactccatctaataaataacttggcaatctccttacccataaatatccctggctccagcaaaaagcaattaaagcacgtgaaaaaaaaaatggcttcccagtactccagaccataacgtcaccggaagcttccaaaggaataattcacaccgtttactggggaggggtcagatctccttactcaccacctgcccaccaggaactaaggctcccattcccttgaaaggtgagacatacacaaaattatctttaaaatgtttaacatgtcacaatgctgcagggattttatcatggaaaatattattcccagcaacaagtgttctataatattttagacagcttaggctgaaattattgggcaaatctttttggaaagcagtcctgccaaaaatgtttaaaacacattaagtacagaggcagccgactaaaaagttattagaggctccagtgtcaccagcccagaaaatatttcaggttaataaggttcaccagcatgccaggtaaaaagccattgatatttatgatagtggcctcaagttcagtgctttcaactacaaaagaaggccacttttgctgaaaaacctcttcgctggccttccctgggcctccagggtcagtgaaggaggacaagctgggtcgtcatttcccacttgtataaatcagtatcctctgcattgcacacaccatgccacctccaggcaggtgaggaaggagccacacactaacatttctcgctgtactcagggaagctggtaggagcatggccttgagaaggaaaggaccgccccattccagttttatagggattctccaaatcacaatcccagttagcccatggcatactcatcatacattccagagtcttaatttgattcatctccaaataatacttttaattgtttcattaaacattgtctatttttatgtacctctctttgcaggtaattgtcacgtacatatgattgggggagggtaacaattgcttgttttaatttcacaggagccaaatacccactatgcactagtcttgcagctccaggatacattaagcaggtatatagtggtaatgtcactacacttgaacatgattatggagctgtgaagtggcgagatttggaaagaatattttttcttcatttattattatgaggaaggaacaataaccaagtttactttcatagcctggtatcagagtatctggggcatatggtgacaggtttgatggagaacatttatttttgcatagcgaaatatttttctctttcccagtaaataggaaacttgctacaaccaggtactcagccttccccacaattctgcaagctacataatatcttgttttcaaattatttaatttaatcttttcaaaagttgatacattaacataattcaaacaccaatctactttcaaaaatatattcagaaaaattttactcctaactttatcatttccatccctttattcctacagatttgtataactttgtattttgtttatccatccaatgtgtacttaggtaaaacaagcaaataagaaaatatattatcatcatccttcctaagacaaaggtagcagagtatatatactgttgttctcatatttaaagaaatacaccttatacatttttcagagctgtgtagtattccttggcataaatgtatcatagtttatctaactagtgccctatccacagaatgtgagttgatttcaatattcaacattttgctattacaatttcccacaagacttgtaaagtgtgtatttgctacagagacatagaataagtactggcttaaaatgtaaatgcatctgtctgtattttgatgattgctgatagatttcctttcatgagggtcttaccattgttccaatccactaaaaacctgtgagataacctgtttccccagaagtcttctcagaagcttatataactaaatttttaaacgttttccaattcaataagtgagaaatggtatttctgcatggttttgattacatcatgtcacctttgtgagggtaattcctactgtcttcggtgaactctctgtttatgtcttttgcccagggacttcccagtgagaagttgctgggcttgccagacttcccaacatcccttttaaaaagtgtttatttatttatttctattttttaatttccataggttttgggggggaacaggtggtgtttggttacatgaataagttctttagtgacttctgagattctggtgtacccatcacccaagtagtatacactgcacccaatgtgtagtcttttctccttcacccttctcccaccctttcccccgtgtccccaaagtccattgtatcattcttatgcctttgcatcctcatagcttagctcccacttatgagtgagaatgtatgatccaacatcctttttagtaaatcatctttccacatatgtcaattaaagttcatttactctattgtttagagtctggcctctggagagagagagccaggtctgtttcctggctctaccatttatttcccagctgtgtgaccttggagagtttcttaagctattcgtacttcacctttttgcatctataacataggcatataattagtacctacaaagtaggactgttgtgaggattaaatgagtcagtacatataaagcagtaagcacagtgccgggggtggtggcaggtggacagtgctcaaatatgactgctctcatacactgcacattgcatatttccgcaggtgctctctgctgcctcacagatgggacacattagggaaaggaaagcctgtgtggccctaccttccactgctgtagacagagaacaatcatttcaaaagagtcagcctaataattagtctctgcaaacaaacacatctgtggactggcacttctcataaacttgggtgcaaacataaaggccactttaaaaatatgtcaccagagaaaatgtcaaaggcttttgggacacagcaagatgacaagggcaaaaaccatgcttggcacatactcagtggggaagcaggcactcactttatttgaattaaaattgatgaaataccttcttccctctttgaaaagtgctgggaaattctacagtttaactgggggagatgccataagtcaaggcagaaaagtggggtgagaaagctgaccttgaggcataggcattcattgtttctcaactattcatttgtctatccctaagacaaagagggtgggcgaatcaagagtaaatggcatgcaggcatcttggagaaagggaagagcagacccatgctgaagaccgttggtggagctttaggcaagttaaagtaggaggagaagaaggctatgactagatttttagaaagggtagaggcagagtctggaaaagtgaacagccaggttccaaacccaatagacagcaatgtgctacttctagagaacttacaaatctcactccaagtatagtggcaaagccctcatcagatttattatctttgaagaaggccagcatgctagcataccactcattttattggaagttatttttttcttttagtccttaaattaggtatctcctaacttttttgaagtgggtaagttaacacctccatcaagggggtggaggggaaaaaaaagtctccatcaagaatgttgtctgccacttgccatctctctgaacgtgacatcatgtttatccttgaacacatgcattactggtgacagtgtcaagcagcgtgcattggtggaaagtgaaggagagagacccaaaggagctctccaacaatgcaagattaattcccaatggatatcactgctcctaagggtgtaaaaatgagagcttagacctggtgcctactgtggtccttctgaaggtgatgaaaactcattatagttagacactgtactatggagagtgcctgaagcagaaacagcatttgggaggattcaaagcaagagagtttaaattataaatgggctgtgtgtgcctgtggagactcagaatggttaaaccatctttccctctccaacactgatcaagacttatgagccagccaagcttacctggggaaggcataggagcttggtgggcagggtgcagagagtaaaaggataatgggactaaagagactagaagaagaaagtaggctctaaaggaagtagggcagaaaggaaagtggaaattttgaagaatttgccctagcttagaaatgtgtacagaattcatgttctccctggcacctgcccccctatatctgccccagaacaaaggagaatggagataatggtgaccctcctggccctgggaggatgggcctagggcaggggtgttactcttatccaccacagctcactttcgttcatctgctcatttccctctcaattaaatggcatttaaaagttagataagacaacaagcaggtgttaacactgtcgtataaaataacaatattagcacaatggcaacagagcagagccagcgaggaataagctctcctctaccccattaaatgttaaaaagtgaagagacagcaggggatctcccggtttgggagagacacctaactcccaaaaaccaagtgaactacttgaaggctggacccaagttaaattcaagctaaagcctgtaaccaactctcatggtgacagataggtgcctccttgacatatctgtaaccacgtcactttctccttttctttccttttcctttctccatcttcaaccctctgcttcatgtaatggctaatgtaactggaatacagacatattgtaaaatatatgtaaattgtatacaaagagacaatattatcctcactcccatgaacttgatcaataaatgccacccaggattgtcagaagattggaaccagagtgactccatcttggacatgggctgggtaaaatgtggtcgagacctcctgggctgcattcccaggaggttaggcattcttagacacaggatgagataagaggtcctgacacagttcataaagatcacgccgataaaacaggatgtggtaaagacgccggccaaaactcaccaaaaccaagatggcgaagaaagtgacctctggtcaccctcactgctcattatacactaattataatgcattagcatgctaaaagacactctggccagcgccttggtaatttacaaatgctatggcaatgtcaggaagttaccctatgtggtctaaaagggggaggaaccctcagttccaggaaatcctcaccactttttaagaaaactcatgaataatccaccccttgcttagcatataatcaagaaataaccataagtatattcagtcaaacatcccatgctgctgctctgccaatggagtggtcactcttttattcctttacattcgtaatacacttacttttgatacaggagttaagaagaaatcacttaggcagatagcgagggtatgggagtccttgggaaggcttttctttttcatgaaaagcagccccaaatcattttctaacaaagagtagcctgtaaagtcgagctgcagacatagacaagcaagctgggagcttgcacgcgtgaatgcggcccttctctttgatcagccaagtgtactgtaagaagcagacaagatggcgccaattaactggaaaacctatttgcagaataagattagggtggagtgaccagccttccccatgtgctatataaacatcatacctgaaggaaccagtctgtgagtcctatgtaaatcagagcccacctcctcaaacctgactataaaatttggcacatttgccacctgctggccctttcagctcagagacccccttctcctaagtgcctcctgtgtgtccgtgtcctacattttcctggtgctcgataacaaaccccagggtatataccccagacaacatagctgcttcactttcactttactctgtgtacttgccctgaattctttcttgcatgaggtccaagaaccctcccttggggtttggatagggaactctttctggtaacatgacagctgagatcatataaacacaaactcaccttatacacacaaatggctcctaggaacaattaagatctgaagctaatgtaatctgtgacattaagggggtgataatagtgtatatatttgtccctgcccaaatctcatgttgaattgtaatccccagtgttggaggtggggcctggtgggcggtgactggatcatgggggtggatttctcatgaatagtttagcgccattccctcggtgctgtcctcatgatagtgagtgagttctcacgagatctggttgtacaaaagtgtgtgactccctctgtctctctcttgctcctgctctggccacgtgaagtgctcgggctttgccttcccccatgagtaaaagctctctgaggcctccccaaaaagcaagcaatgtcaatgccatactccctgcacagcctgcagaaccatcaaccaactaaacttcttttctttataaattaccaagtctcaggcatttctttatagcaacacaagaatggcctaagagggcatctctaataaagcctgactcagtctgttagcagggaatctatctggaagcacagagcatgtgtctgagaagaggaagggacggttttcacccactactgccagaggaacctgagtccccaactctacactccacctgcctggtttctatggcagaaagaatatttgtgaactgggtggattatgccataatatgtgcatgccaggaaacatttgaacaggaccatgatgtcccctttgcctgaattctgctaccttctagttaaaatttattttttgatttagactttggatgggaaggaaatggaccaatggaggaactcctgggctatcatgcagtgaatctggctcatttacaaatcagtaaagcaccactgaatttccatgtttatttcctggatgcgccttaccctgaggcttccagagagatgggccctttctcagtgcagcacaaaatagagttctgtgagttactctttctctattgcaattcccctgtcttgaactttcagaaccaagggccaccccagcaacactaagaagctgtctgtgccccgatgtgattggtcagccagaccacgtacgctagaattaggaaatagggtggagttgaaaccgtcattgcaaaattgtaattgagacagtgaaagagatctaacctaagcaactccatctggcttctaacctccaagctgtccttgttcatgcctgggcataggctgaactaacttggggaggggcttagtttatagttgaaaacaaagatgataacaggcctttcccagggcaaatccctttcttgcctggggactagactgcctttgtagtactaacaaattagccacaagattagaaattatggtttaggagtctcacggctggaggctacaagattctgaccctccctaaactgctcttaagatcagtgctttagatattttgcaaaccctgcatttgatggatcagctggcaccacccagtttgatcagctggctcatctgatcttgtagcccctccacccaggaactgactcagcgcaagaagacagttttaattccctatgatttcatcttcgacacaatttgtcagcactctcaactcactggccttctcccacccaccaaattatccttaaaaactctgatccctgaatgcctgaggagaccgatttgagtaataataaaactctggtttcctgcacagccggctctgcgtgaattactctttctctcttgcaattcccctgtcttgataaattggctctgtctaggcagtgggcaaggggaacccattgggcagttacagagtggcaacaaatatctttgtctgtgctcccctcaattccgattttgatttttcagggtttccatctgagtctgggtcccattctctatgttgtcagagcacttgttcgcaaatgtgagtgagcttctcagtcactagaagagctgtaaaaacagattacaaggccctgcctcagtttctaactttagtaggtttttagtggggcctggttatttccatttctatgttcccaagtaatgctgatgctgccgttttgggaaccaccttttgaaaaccactttattaaaataaatcaataaataaagtaagcagcaaggtgcacccttgttaagactggtaagacattacatgagacctctcccccattcatgtgacagactttgccaccggagaaggaaacaggacactgaaaagtgaaaatgttcttcctttatggagttgatccctctttccttctccagtgttccccatatttatctgtaggttggtactgagtaacaacttcaatcacttgcttttattttcacaaaacaagaagttctgttgttattgtttgtttgttttgtttgacgttttttgaaggcaacaaataatgccatcacccaatgcatgtgtttatttctcagagacatatggagataaccttcagtattcctaaacttatggacatagctattattccctgcgtctagaacatatttatctactttctttccacttaggaaactcctattcatcctgttaaacctgttttaggtatcgtttcctgtctaaagcatcttggaccttctctagtcaaactaaattaaacactactcttttttttttttttttgagaccgagtggagtctcgctctgtctcccaggctggagtgcagtggcacgatcttggctcactgcaagctccacctcccagttcacaccattctcctgcctcagcctcccgagtaactgggactacaggtgcccgccaccatgcctggctaatttttgtatttttagtagatacggtgtttcacagtgttagccaggatggtctcaatctcctgacctcgtgatccacccaccttggcctcccaaagtgctgggattacagtcatgagccactacgcgcagccgaattaaacactattcttcttctccaccctgtgctttccgctattgatgtgcttcacacaatgaattcaacttacggtctttacccaaatgacagccctgataaatgggaagcatcagtcatctcccataatgggggataaccactcaagggcactttttataatcccaggtaccaagcacagcatcttcacttaacagatggatcgtggcttatggatcagaactgaatggtggacttagaatcatgtaggaaataaagttgctgatttaataggcatggctgtttgcctttccctggagacagccatttactcctaagtcggtgtgtacaaaagattagaaaaagaaagggagagtgtgctataagccccagtgtaccgacaagtgacccccacaaggaagagtgtgcatgcacaccaggagaaagagcttggaactgctgggccacagaagggcatagctgagtgcatctctgtgaggcagagaaataaaattaatttctctttaaaataggataagtaggcaagatatggctaattataatcaggtattctaggcagagattcttataacacttttaacaaaatacataaatatattctaaaatgtagaggaagtttgaatgtttagaaaggaagattcagttatctagaatattcactcattcggaacatctcattatctgataatgcggaatgaataatgcattcctgtacgttttccccggattcccccatattctcccttcccaaactctgccaatctgacttcacagatgaaagtgcctgaagctgaattggatctactgtgtttggttttgaatgcaaaatgagaagagaaaagatattaatttggaaaccatgagccaaagcctccttcccttctttcccaattttgtgccctttatcatctttgctgaaccccaggagtgatgaggagctggccaatggaaagcctgcctgccagggacctttctgggaaatgctctgcctgcctggaaattcctggggcctgcagaagttagagcaaaggagaacacgctgggacctgagatttagatcattaaacgtgaggatgagactgctcccctcttccactctgacagacaaattatcaggcaaattccgatttccttcaccccatgtcagtctgctgttccacagccatcaaactgtgtttataaagtttatctggttttaatttgagtgcagactgtaggccaaaactacaaaatctttagttggctcccacatcgccctaaaggcctcagcccctggcacaagcctggtatttgcccttctatactgtgtcaaatcaaagtctgtcagggacagaatgggtctcagggcaggagaaaatgaaaccatttccagcaagtttttgccaaagcattcagaagccagctagctgctgagcatcagggacacacttgtaaatcttccctttgtcagaagagccatgactggtcacaaaacaagttggcctggatgagctttgctgaggacagtggggacattctcagctctgcaggtaccaccccacctgctggggtgtctcagctcatggtgccctgtctccagtctaccaggccagagctttcactgtcacattgaggtttgcaattcactaggctttccaatgttctgagccttagcttaggagtttgcctaatacaaaggaggaccctatgaaggctctttccatgtgtttatgttattaactcacagagcttttctttcattgcaaatagcatccactgaaaataaaaagtaaataaaagccatgggaatggggtaaagttttttttttttttttttttttttttttcattagctctatggttagatagacctagatctgagacgtagagtttctgaaagtttctgtttggggcattttctctgatgagaacactatcctaaaaagtccttaggatgcacacttagagagtccataatgtcaagagatccatgggaaaatggcgggagcactgcgtgatgaagaccagcatgattccctctgagacagtaggggaaggatgctgcaaccacaagggaaaatcatgtctgataagtctgttagatttcctagagagaaacatgcatttttttgattaagggtgtattcatctgtttcatgctgttgataaagacagactcaagactgggtgatttataaagaaaaagaggtttaatggactcagttccacatggctggggaggcctcacaatcatggcagtaggaaaaggcacatcttacacggcagcaggtgagagagaatgagaacatggaagcagatgagagagaatgagaaccaagtgaaaggggtttctccttataaaaccatcagatcccatgagacttattcactaccacaaaaacaatatgggagaaactgctcccataattcaattatctcccaccaggtccctcccacaacacatgggaattatgggagctacaattcaagatgagatttgggtggggtcatagccaaaccatatcaaaggggaaccagccaatctaaattaatttagattcattttcagagatttttcagtctctggaatggcttgacaaaccctcaagtctgaagaaaggaggggatgaatgaaggcgcgtagacttctgaggatgagatagtgagcaaccatgcccccttcatccattttgctcactgttaatcagaattctgggcccatgtagcactggtctgaacaaataatggcttttgtgatcttaacatgaactctgtacctgtgtgtaaggtcacagagcacttgtgaagtgagatcaacaaaggatgatctctttacaaagagagtataaagaacttcaaaggattatatcaaaacgtttcttgtttcaataaaaattttggattttttttttgagacagggtctccttctgtcaccaaggctggagtgaagtggtgtgatcatggcccactgcagcctcgacctcctgggctcaagtaatcctcctgcctcagcctctgaagtagctgcgtctacaggtgtgcacgaacacacccagctaatttagaaaaaaaaattttgtagagataggatattgctgtgttgcccaggctggtctcaaacttctgggctcaagcaatcctcctgccttggcctcccaaagtgttgggatcacaagtgtgagccactgtgcctgaccaaaaattgttgttctttatagtaagggaaccagaacatattaattctaagatgaacttaagatcatttataagaaataggggtctatcttacttgatttttttctcctggaatggcaagcctacccaaagatcttcaaaacattcagggtgtttgcttctaattatggaatcataaaattttagagctacaagagacgttagaatttgcctcatgacacaacttcctcatcctacaaatgaggaaattggggtccagagagaagacactttccaaaggtcacacaaacaggagagtgtgtggaatctcagctcatcaagtagcttctggcagcttgcagaaacttcctaggaatgtgagagtgaaacaggtcttccaattcatgcaaacagacttgaagttcacagcatacgtttcccactgcattaagaggaggtcagagaggctgccactttctccttccagaacactcaccctcggctggcctggtgcacactgtaccctctgctatatgatggctgttatagcctccacttcctctccaaacctactcctgatattacacttacctgcaccaagtactgcaggaaaagagaagtgtgactctagttgggcctggactctcctaggcggatattaaactccactttgtcttccaaagtaccctgaacctggaattttatcattttgaaacccatgaggaagagagttctgactctttctcacaaaatatgtgtgtacttaggcccgtgttcctggctgaaaatgagtttccaattttatgtgtgaaattgcttttatggagcaggatattacaagaaaaaaatcttattcttaccctagttgactgggtatctatgaaaagaatggagacaaagtaataataaaataacaataccatttttacctcttttattgcctttgcaactgttgttattaaatacagtgctcagggaaagtgccagattatgtccgtgggagccagaaaccaatttagattctgtacccagagccgattgacagtggtggattccaaggtcctttctcctcagtcgtagagggagtcagaggtatcacgtcccttagaaataagtgaaagaggtatttctgttcgctcagttgagaattaggatattacgacttggttttctttcttccttgattaaccctgcagttggaaggggagaagccttactctgtcggtgcccaacccccctgctctggaaaatgggatgcttgaggatgcctgggctaccatgatatctttagtgggctgtccaatgaagggccatggctcccatgcctatttgaatcccgtcctttcctttattaataatccattccaaagttcgcctcttcaagaaagctttcttagttaacattgcctgattcatgacactcattaaattgtgtctttattcaaaaaacagtacctgagcacttccctatattctaggcactttgccaggcactgaagtaataaagacgaataaggttcaacaccggcattgagttgcactatctgcatgagaaggtgataagtacacacagggtgatgggcaaaatagcaggggtggatgggcaccaggagagtcagaaaaggctctgcagaagatgcaacattgtggtcttttagaggtatttatagataatgtgctttaatttattttaaaatcttctcttactcatcttttgaaaaaacaatgtcttctatcaggtggaacaaatgagacaaaaaggaagacacacatgctcacacatacacacacggtgttacttagtccctactatgtgtagggcatgtgagtagttagaggagatgcattgaagagtgggtaccagcctctttcatcttccctgataggagagttctttctccctttcctatatttagaccttcatctcttcatacccagcttcagttttccccttctccataaaaattctgatttcttcttcttcctcttttcctttctctttttcttcttcctctttttcttcttcttcttcttcctcttccttctcctcttcttcaccttcttcctcttcctcttctcccctcctcctctccccctcctcccctctccccccctcctcctctccccctcctcccctctccccctcctcctcctcttcccctcctcccctctccccctcctcctcttccccttctcccctcctcctcctcccctcctcccctcctcttcccctactcgtcctccccatcctgtcctcctccactcctcctcctcccctcctccccccgccccgttttcttcttctcttcttcttcgtcttcgtctttgtcttcttgtggatattaagccagtaacaagaacaacaagtttacctctgtggaatacaagttcatctatatgaaccatcctgtttgagttttgtattctcataatacctcttttatgattgtatcctcctcatttaacagactaaaatacaaatacagctgatctaaccataagtgatcattctaaatggcatagcagtggctgccaggaacaaaagtcccatctttacaatcctaacctattctttaccctgattctgttgatgattgcataattgttgaccgttcaattttttcagccagaatcttgatttctatgtgggtgatatgggcaagggcactcttctagactcttgatgttattccattcatgtgcccccatcccaaccagagcacagctcatggctgaccaccagcaagcgctcaattaatattttcaactatttgattgggaattgtcaattcagttccaatcagtgatccatagaatgatgacttccatgtatatttagtttgagaaatgggagaaagaacaaactaaaaaaaataagaaagaggcaaggggagagagaaaaaggacaaagaagaaaagagtgagagggagagagaagcaagaaggggaggggaaagagagggagagaggagccaaagggaggaaggagaacatgcagcattctcggtctcccactgtcaaatctatcttgggcccttaaaggaagcaggtctgcagaaaaccaagcaaatgctacaaggttatgggtaataattgatgtttttgtggggcaaaagggaaaaggaggggtggaagatgaaagaagtcaggagggagatggaaaagttttcagggtcacaggatacatttatcagaagcttttaaggaagtgtttaagagcagctaagctgttgctatggaaataggtaaaagctaatccattatctgcaacctctggacgccaccagcttgccgctggggggcattctgctttttattagtacttctttttcttttttctcttcaattttttccactccaaacacatcactggaattatgagaaacaaattaataaaaatggaatgaaagggaactctactccttcagagattacattaacacatgagggaaacttcaccccatgtgtcaactcgtaaagagagaagagattatttcaagaagataagacgaaaagaaaacaacaatatatgaccacctggagggataaatgtcctgttcctcctagtgccactctcgtccttggctgcagctctgaagtttgtgctaaaacccacagaagacagcatatgcctcctggttttaaaaccagactgtgacctttgattggagccatttaagaggctttgaagcttcaggaaagaattggcaaaagctattttacaagtatccctcactttatataaaagccataatttatctatagcctcactctgtgtgagtaaaaaatttatgtgaacttagtcatttcccacaaattatacatgtataaaatatagatttgaatcaattgatactttgtatgtgcctattgtgggaaatgttaaaatgtcaatgccaatattaccattgttctcagatcttccctttttgccattccctaggtaatagaaatctctaccatgacttggggtcagtaattgtgactccacacatgcaactttcaggacttggttatctttttccatttgtctataaagttacaggtctcacagttatatcaaattcttagtaatatcaaaaatcaaaatctaatagttttccacacaccccagtatctaattacttatttttaaaacttactttttatttcaatatgtttttgggtaacaggtgatgtttggttatatgaacaagttctttagtgatcatttctgagattttggtgcatccatcacccaagcagtgtgcacagtacccaatgtgtagtcttttattcctcacctggacaccaccctttcccacaagtccccaaagtccattgtatcattcatacatctttgttttctcatagtttagctcccatttatgagtgagaacaaaggatttttgattatggccattcttgtaggagtaaggtggtatcacattgtggttttgatttacatttccctgatcgttagtgacgtggagcatttttccatatgcttggtggccatttgtatatcttcccttgagaactgtctattcatgttcttagcccactttttgatgggattgtttttttcttgagttctttgtacattctggttgttagttgtttgtcagatgtatacattgtgaagattttctcccactctgtgggttgtctgttaactttgctgattatttcttttgctgtgcagaagctgttgcgtttaattaagtcctatctatttatctttgtttttgttgcatttgcctttgggttcttggtcatgaagactttgcataagccagtgtctagaagagtttttctgatgttatctcctagaattgttgtggttccaggcccttctcactcaaatctgaaacttggaagtcaatttagacttctcctaacttaataccaacactcaaaaagtcactacttcttgacaatattcattatctgaaatgacgtgtatgtccccattccacttcatcttcactatgatgatcttcattttggctcttaccctgtcttaagtgaactactccaactacctgctacctggcttgctgccttgagatccctctactccatcttccacattgatgagaaagccctatttctaagccactattaagttgtgcttcttaaaatcctttcctgggtcctcatctcctccataggctctttaggatgataaaaccctttccagttggcccctgcctgtctccactgactcatcagctgctctgctcccacatgtgcccctgacaccatgtttgtctgccatccccactcagtgtgggctccttgacggtgtggtcttttcagggcctggtccagggcctgggacaagaggccctcaataaatgcctattgttggccagtagctgagattcattagcacacaatgctgggggaccatatggctgctgctccaatccactgtgaaaatcattcaactttagggcttcactgtaaaatgaattcatgtcatacttaatcatttctgtgaatttaaattctgaatgatgagcttacttagaaagagacataactgttaaacatcacttgtaactcagtggacaacgatggcacaggagaacaggcctgtgagcaaccaaatacatgtgttgacattaatgtttaaaccaaattatgatccagtttgcagcagattcacctttccaattgaactttctaggctgtggagcctctagcctagtgtccatacagccacattctcagcaattctttgacagaaggagagttacaaaagagccatacttgtattagaccgaactgaaggcttccagggttaaagataattcttgaaggagtttgcagtaaatttcctttctccctagttatgcatgagttgaaagcactgactgagcagagtcagagaggaatgtatttgagttgtaatatgtgttcttgtttgagaacagatgattagcactccaaaatgagggcctggcaacacaggtcccgccaaattaaagaactgaggcactagaaactggtgttttcagagcaagatctataattacttaaagcttctacaaaaatgatagattaaaaaagtagaggcacataggtctcctgtaaagcactatttggaaagtaggggtctcaggaaaaaaaaaaagtctagtatgaaaaaatcaggggtataacccagaggagtcgtttgttggcatttgggtagcttcaagtagagtggctcttgacatttttatgactaagagggaatctgtgaaccaaactgaagaaatttcttttctactagtccagaacaatgaaaaacaagctctgggttagaattataaagcagaactgcaactgatggcaaagccaaaactacatgcctatgctatttttgatttatatataggttacatctcaagattatcttgtgtgtttaataccccagtgtgcctgaggatatatgagggagaaataaagaggactgagaggaaggaaaccatgacctacacagcaggaacttttgatgtgggtgggtcctggcaggaagttatccaagcagaacgatgctatctgggagacctttgggttggggggtgcatttcatcatagggctaataacttgactcaggctgagcaaatttaaacaaattggctaacattaaaataaaaagcaggcaaagctcaaatgccaccagtgatgtacactgatgtatacactggaaatgcctctagaatctctgaacgtacactgagctcagcaagtgtagatagaggtcagtaagacattaataggcaatgttactccataaaccttgttgtgttctgtattcactttgctgcttttcagtagtatagagaaaacatctacctctcctcttcagtggcacacagtccaccttttgttggtcatagctaattttttctgttcattaagataaatgcttatgcacattattaatttaagccatcgttaacacccctgagatatatgttattaccctcatgctagagatgaggcttatgcagccagtcaataatggacttaggatctgcagccagggagtttgacctcagagtgtgtgcttattatcactctgttatgctgtgggacaagacagtgctgtgatacttggagtataaagactccatgttaaatttgcatctataagtgtgagtgagaaagaggtgtgtgtatgtttctgtatttgggtgccttacttctccccgaatgtctctgggtttgttgctgttgactcttgcacaattcaccttctctttggggagaagctcattcatgggaatgggcttttggacgggctgatggaaatgttttgcaactagatagaggtggtggttgcccaacactgggaatgtactaaatgtcactatattaattgttcattttaaattggttaattctatgttatacaaattttgcctcaactatttttttatttcaccttttcctcccataattagactcacttgactgaagaaatttcctttcagtgtccacatatcctctatgaatgggatctgcagaagccatttttacaagtttctttgaaagcacttatgtattattgtccacttttacgttattaaaaaaacaacgaaaacaacaacaacaaaaaaacagaaaaacttcactgacagcatttttttaatcagtgagactttttttggtggaggtggaggagatgttgcaagatttacctccaaaatgctgattttgccccaaaatgctgttgattccagatagccatgccctggacaacacactggtcaaccactgccatgtgaagaaggggactctcagcgttgcatacctaaagaacatcaactcactggtcccttttatgggtgagaaaagtgaggctgagcagcatgaagccatctgacaaaaatcacgtggaaagttgatgatgttctggttcagtgacgcctgctctcccgattgatcttgagtctggggctctcttggcctggtcaccctggccattgtggcccttggtttttaagcaataaagtctccaagagccaagatactctccctctattactcaattatcttatgaaatgaagtgcgtgagagacacagctcctgctgaggtggcacttgacagtgtccagagactactggagccaggctgggagacctaaccgcttccttccacaacagcacactttaacatcactctacaagaggggcaagttttggtgattcttcccagattgtcagttctcagcaatcagagaacacatctcttatttcttctgaatctctccatcatttttcttatgcaagaagggctcagtaaatactgttcactgactgactagtggaggttgccatttctggagctccgcataaactgattatactgaggaagtaatcctactgtacctcctaaggttctctaatgagtgtgacaggcgcttagaaagtaggcttccaaaatgatgtgatgtgaaggcattcatttacactgctcctaagggagtgttcccctgtgtgcatgcattatgcattctacagtgttaaaaaaaaagcagcaattctggtctctgtggatgtgttttatatgctgtgttaaacatgctaggaaagctcagtagattttacagtcctggagactggacaaagtcaacggggtatggtagacagaaaacatgtaaatcagagacaaaagacagacattctactcttgcctcctcatcttattaatagggtcctgggaatgccagtcattattgtggaacttctgtttccccatctgtaaaaagggaacaacaatggcaaatctcaccttgttatgttgtggtgacagtccaacaagaagaggtaagtgaaagggctttaagaactgtaaaagccttctgttattaaataatcttaacggtatctctacaatctgtcagacttgcacccttaaaaaacaaaaataggaagcatcacatgggcatctcccaaaaaatgttcctgcctctgggaacctctctaggttatcttctcctttacttcccagatcctactctaacccatggttcccttttacaatatggccaatatttccaaacactaatgctcatgctcaccttctcaacttgggctgtttacctttaaaatctgctggtgacttcacagaaattcccacacctggaccaagttctggctagtaattgaacttgaatgttaatttgggaatcatatgtactcagatttgaccttctcccgaacgttagctttcacatgactccagtgcatgaatggacccacagggaccagcatttccaaagtccactcccagattcctacctcagcggctctcctgctcaggcccttatgtggactcaaccatgtatcaggcttgacattgactacagctaaacagaattctctggtggccctcaaaccaccccagtctgcgactgacagttctcaatgcttacaagaagctctctttgcatttagttctatagatatatagaaaaccaatgtgtcttctgctttcatttctttgatcatattacctagacctgtttagcaactctaatttttaaacatctgactgggcacggtggctcaagcctgtaatcccagcattttgggaggctggggcagtcagatcacttgaggtcaggagttcaagactagcctggccaacatggtgaaaccctgtctctactaaaaatacaaaaattagccaagcatggtggcgggcgcctgcagtcccagctactcgagagactgtggcaggagaattgcttgaacccaggaggtggaggttgcagtgagtagagattgcacaactgcactccagcctgggtgacagagcgagactccgtctcaaaaacagaacaaaataaaaaaaacctcccatttggctctgtctgattaacatctattaagcccccaatatttacaaagcatgatgttaggcactgcaggtgatatctggtagaggagaaatataaagatagaatattatgaagaatttggagcaagaaactaaaaaccttttcttttctttttctgtttaatcttttatgaaatctttggtcccaattcaaaccatactgttgtatatgtataattaaggaagctagagcatctaatgcagggcttgaagtttgaaattgtttggctttatgagcacaacatagagaaggaagacatctggatacttacttgttgtcagctctactctttcagcacagctctttttatacatgttttgccctgaatcaccccaacagtacatctagagaggtggacagctagaaaatgctacttactaatagactaacttactgggttaaaatgttccaaattattatgagatctaagatacagtcacttggaaatgtgtgagctttctcaaatgagttattcaatttgcaacaataatttctgttgagagaccactttgttccaggtattgtgataattttgggtgaaacaatcccacaaagagcttttgtgctgctgggcagaacatcatgctgcattttctgtttatcactgcgaggtgtcttcacagagtttgaaaacaagtgctataaaagcacagtggagaaacctaaccaatcttaaaatgtcaaaagatctaaaataaagccatgtctaagtcgagatgcaaaaataagtaggtagtacaggagtgaaactgggatagtgatgaaggatattggatgaagacagaatcccaggcacagagaccagcatgcacagaacccaaggagaaagagaacacggtgcatacggcaacaacatcaacatcagttaggttttttttttttttcctgcagaatgactactggaataagttaatgcaaaaaggagacttttaaaataaggatataggatgacagtatagattctacaggcagaaacagagtggcctcaatcatgcattgggagcaggaacatgagtacagtaaggacacagacagtcctcctgctcaccaccccttgcctctactcctcactgaatacttctttttctctctagtgggaaaaagcttttatcgcttcccagttctcatggtgaaaaattaaccaatgccaacagcaactgagttgccacgctcatcattgcaatcagctgatttcaaatttttagaaatgaggttattggtctaacccagatcaggaagtacctgtggtcctctaaactgtgctacaggataaaagtcatattgaataaacatggttctcctattgctccttttgtcaccatgtcacaaggtcaggggatccgggagagaggtggagggatggtgaatttgttatgaaagtggaaaacacagtgagctcaagggacaactagataggtctccacaatagggaaatgtaagtagtcagatatggttatggctcatatcataaagctattatattgctcgggcagggggaggcaaggtcataaaaggccttgaaaattatgtttaataaaatggatttttatcttaaggacaatgaaaaatcatttggagttggagagagaattgggtaatgttttacttttatttattttaatgttcgattcagaggtagattctatctgatctatcctttagaaagatcacttgtcattctgaggttgcattggaggcagctgaaaagcttaggtctgagatgacagtccgggtaactaaggctctaggagtgggcctggtgttgcacagaacagttgttgcaaattgtttgactttggtcatgtatgtgccattcacagacagaagcctgggaaaatggcaacataattaggaagtgcgggtgtgagagtaactcagcagctaatgttgaaaatagaaaggggtccctggaccgaatagatctgtgtgtgtgtgtgtgtgcgcgcgcgcgcgtgtgtgtgtgtgtgtttgattagtcaaggtgaaaaaaaaaactttcctattaagcaccaaaacgtatgtcatgggtgtgcaaataccaagacatatagatggatacaaaacctaaaagtaacagcattaatcacgtaatttcatcaccagaagcttatcctaaggaaataatcagtaacatacacaaagtcccttatacaaggttgtttactgtcatgttattaatagaagggaaaaaatctggaagaaacctatatttccactgtttatgaatcaattaaatgaatcatctccgttgtacagaatgctagatagctgtactgggttgaaaagttctccccagaatttgtctacctcagaacctcagtatatgactttatttggaaacagggtctttgcagacataactatactggattagggtaggtcctaatccaataactgatgtccttataagaagagagaaatttggatgcagacacacgcagaggaaagaatgccgagtgatgacagagacagagactgcagcgacgcaggtgtgactggaaggacaataaggacggccgcagccgcagaaactgggaaagggtgaggaaatatttcttcctggaacctcagagaagaatggtcctgccaacacctggattttagacttctagccttgacaactgtgagagaatacatttccgttattttaagctacccagtttgtagtggtgtatgatggtagccctgtgaaactaacgcagctgccattaaaatccatttatttaaaaagtaatgaataagatacaaaaattgtatgttccttgaaaaaataaaatcatggattttaattcatagcagagtgaataaagaaatatgttgtgatatacaaaaacatctttaatactaaaaataaatagctatgctgaaaagcaggaggaaagccattatggatcgccaatggtaaatgtgcagatacaggagatgaaatccgtgcagtgggaaaggcatggggcaggcagcggggcaggttcggcactcgcctgcggtcggggctgactatgcccatgcatcctccccacctcaaatttgcaaatttaagttctaacccccagtgcctcagaaagtggctgtatttgaaggtaacatctataaagaggtaatcaaagttaaaatgaggccattaggaaacgccctagttcaatatgctccgtgtcctcataagaagaggaaattaggacacagatatccatgaggcgcagggagaagatggccatcaacaagccaacgtgaaaggcttccgaagcaatcaactctgctgacactttcatctcagacttgtagcctctagaactgtgagaaaataaatgtttgttgtttaagctacccattctctggcaggcctagacaagtcatacacttgtgtcacttacataacagagaggcatccttgaagaaagatatagagaaaatgggagagaaaaaatatttcaggagataatggctaagaattcttcagaattaaggaaaaacttcaatcttcataatgtggcagtagggggtagcctcattgaatgctgaacaagagaagtaaaatataaaaattaaacttcaatatagtcctagacgtaatgagaatgaggaaatttgtaggctgtcatagaaaatctttaaaactatcagagagaaaagttagattacctgcaaataagtgacactgagcagatttcttagcagcagcaatagactccctaatacaatggtctattgcaatgaaaacaaccaatttataattctatacccagctttaatatcaattaagagggaggataaaatacaaacatcttaaatcataaaagaaatgacaaatttcaccacccagaggccttgatcctaaatgatgcattcagtgaaaaaaaaaaaccgaaaagctaatgaatccaggtgaaagaaatgggatttcagtagcagaggtgaaagaagaaatcagtaaactaagggcaattctaaaaatttattataatcataaacataattattattttcacattaaaaatacctgaatcaaaattcataaataacgggttcaataaactgtatgccacaggccaaatctggctttctttgctttactaaataaagtttcactgaaatacagtcacattcatacattttacaattgtttctggctattttcatgtttcaacagcagagttgaatagctgtagtagaagtcacatggcctttgaagcccaaaatattttcgtttggccctttacaggaacattgctgacccctgctctagatcacaatgacatgaaaatattcaaagagatgctaggagaggatgttttgaggggaaagtttgtgaggacatgagggtttactaaggtcctcatcttcaggagcaggcaggatatgctgattttctttaatgcaattattaaataccatgaatgtaattgtacatgcagactaaaatacttaaaggtagcccttaaaataatgggaataaaatgcattatctttaaactagtaaattcaagtaagtagaaagataattacatgttaaaagttttataaattaacagtctcaaaaaagaagcaggggaaataatagtaaataaaaaacacataatatgttttatacatatgtgtgcatgaaaaattatttaaatatactgaaagaactcaggggaataggcaggaaagagagtatatatatatatatatatatatatatatatatatatatatatatatttagagagagagagagaggatatatactttaggcatgttgatcaataactccccattttcccttctcttacatgatggttaatattaggtgtcaactcaattggattgaagtatctccagatagctggtaaaatgctgcttctctttgtgtctgtgagggtgttgccaggggagaccgacatgtaagtcattgaaaagggagaggaagacacatcttcaatgtgggtgggcaccatccattcggctgccagcctggctagaagagtaggtggaagaaggtgggataagctgccttgctgagtcttctggctttcatcgttctcccatgctggatgcttcctgcctttggacataagacttcaggttctttggcctttggactctgggacttaacaccagtggtttgctggggggtctcgggccttcagccacagactgaaggctgctctgtctgcttccctgcttttgagacttttgaactgagacactactggcttctttcttccccacctgtcagacggcctatcatgggacttcgccttgtgattgtgtgagccaactctccctaataaactccctttcatatacacatatatcctattacttttgtccctctggagaaccctgactaatataccttagcttccagtaaccaccattgcagtgtttgctttgatgaatttgactactcagatatctcatataagtgggatcatgcagtatttgtctttctgtgtctagcttattttacttagcataaagtcctcaaggtccatccatcctgtcacatattgcagagtttcctttttgtaactctgagtactattctatcatacacatacaccacgttgtctttagccactcatccatcagtgggtgtttaggttgtttccacatcttagctatcgtgaatagtgctgcaatgaacaaggaagtgtttatatctctttgagatatggacctcaattcttttgaatatatactcagaaatgagattatgaataatgtagtagttctatttcttattttttgaggaacctctatattgtttttcatagcagctgtaccattttgcattcccaccaatagtaagcaagggttccaaatcccccacatcctcacaaatatttattttaaaaaaattgtataatacccatttctggtatgtaaggtgatacctcattgtggtttaaatttgcatttccctggtgattagtgctgaacctcttttcatgtatctgttggccatttgtatgtcttctttggagaaatggctattcaagtatttagcccatttttaaatcatgctttttttttttttggtattgagttgtacgagttctttacatattaatatttttagagattaacccttactggacataatggttgcagatattttctctcactcccttggttgcctgtttatgtgattgatagattcctttgctttgctttttagttggatatagcccccacctgttgcctgtgcttttggtgttatatcaatgaaattattgccaagaccactgtcatgaagattttttcccatgtctttttttctagaagttttacagtctcatgtcttctgtttaagtctttaaaccattttgagttggttttgtgtatgctgtaaagtaagggtccaatttcattcttctatatgtggatatccagttttcccaacagccttgatagataagagtgtcctctatccatggtatattcttggcacccttgttgaagatcaattgactatgtatgtgaatttatttctgggttctttattctgttccattgggctgtatggctttttaaatgccagtaccatacagttttgattactatggcttcataaaatattttgaaatcaagaagtgtgatacctccagctttattctttctcaggattgattggtctattcctagtattttgtagttctatatgaattgtagaattgttttctttttctatttctgtagaaaagtctctgatattttgataggaattgcattaaaactgtagattattttgggtagtatggacattttaacaatattgtcttccaatccacaagaatggggtgtttttctatttgtttgggtcttattgaatttcatttatcgatcttttgtagtttttaatgtaaaaatttttcacctctatagttaagtttattcccaagtatttcaattttttgatgttattgtaaatgagattgatttcctaatttctttttaagatagtttatttttagtatatacaaacacaactacattttgtatgttgattttccatcctgcaactttacagaatttgtttattaatttatttaaggaatctttgggatttcctatatacgagatcacatagtctccaaacagttataattttgtctcttcctttccaatttggatgttttttaaaccttttttcttgtctaatttctcttgctgttatacaacctccaggactattttaaatagaaggagtgagaatagctatgcctgacttgttcctgaatttagagaaaaacacttttagtttttcaccattatatatgatgttagctgtaggcttttcatatatgacttttatcatgttgatatattttccttcttttcttagaaggaatactgtgttgagagtatttatcacgaaaggacattacattttgtccaacacattctcggcatctattgagataatcatgtgatttttatcctttattccattgattttgtgtatcacattaatttattttcacagattaaattccacttggttgtggtgcatgatgctttgaatatgctgtccaatttggtttgctaacattttgttgaggatttttgcatctatattgatcaggaatattggcctatagttttcttttcctgtggtgtttatttgtctgctttagtatcagggtaatgctggcctcataaaaacagtttagaagtgtttcctcgttttaattttttagaagagtttgagaaagattggccttaattatttccatgtttggtagaatttacctgtgaagccatctggacctgggcttttctttgttgggagatttatgattactggttcaatcttcatactagttatgggtctgtttaggctatttcttcatggcttagttgtggtactttgtatgttcctagaaatgtatgaatttcctctagcttatccgattaattggcgcttaattgttcatagtagtctttcatgttcttttttattttaaatggtgccagatgtaaactctcttctttcaattatgattttatatatttgagtcttgtcattttttcccttaagtagtttagttaagaatttgttaattttggttatcttttttaaaaaaggcaattcttagtttcattaatttatttctaccgtttttctattttgtttatttctgctctaatctttgtgtttttttttttttggtttttttgtttgtttgtttgtttttgcctagctaaacctgggcttgatttgttcttctttttctaactcctagaggtgtaaaattaaattgtttatttgtaatcttccttcttgtttttagtgtatgcatttatcactatgaactttcctcttagtattacttactattgctgcatcccataagtttttgtatatcgtatctttgttttcatctgccttgcagtattacataattttttaaaaaattcttcttttgacctattgttgttcaagaatgttttgtgtaatttttatgtttttatgaagttttaaatttttctcctaatattagtttccagtttcatctgtttgtggtctgaaaatatatttagtataatttcaattttcttaattttgctgagacttggtttgtaaatctgatgtatgatctatcttgaagaaatatctgtgtgcatttgggatgaacacgtatctactgttgttggatggaatgttctatatatgtccattagactcatttggcctgtggtgttaagtccttggtttccttattgatcttctgcctagagttctgtccggcatcaaaagtggagaattgaaatctcttactgttattgtactgttgtctgtttctcctctcagttctgtcaaggtgtgctttacttatttaggtgctctgatattaggtatatcatatatatttattatgtaaatatattgattattcctctaatcattatgcaaggtgcttcttggtctcttttggcagtttttaagttaaagtcagtgttatctcatgtaagtataaccactcctgctttcttttggttaccatttgcatgaactgtttttctccattcattaattttaagcctatgtgtgcccttaaatctcaaatgattttcccctcacttgagttgaggtcatgtttttctctgttctttttaaaaaaatccactcagccactcaatgcgttttgattaagctaagtattgatagtgaagggtttactattgctagtttgttagttgttttattttagtactatagttcttttgactgcattttcttcattaactgttttcctttgtgttttactatttatttttgtactgatatgctttgatttgtttctgtttttcttttgtgtaagttctataatttaattttttgtgtttaccttggagcttacacaagacatagacataagagtctaatttaagctgataacaacttaagtttaatgacatgtaaaaactctgcactttaacttctccccccacactttgtttattgtcataatttccatttgtttttactctgtatttttaaacatatatttacttatatttatttgtaataatttatcttttaagttttatttttgaattaaaagtgacttactcactaccattacagtaatacagtattctgtatgtttacatacttacctttaccaatgagcttcataattttcatgtgctgttttgtattgtattgtattgctatttagtgtccttttatttcaacttgaagaactcctttaaaatttcttatgtgacaggtttagtggtgacgaatacactgctttatttttgtctgaaaacatcttttttgtcttctatttttttagataacagttttgccaggcatagtaatcttgattggtagttttatttatttatttttccctcttccattcccttatggcctgtaaggtttctgctaaaaatccactcacacttgtatgtaaccagttgttttttacatacaaggaattcccttgtatgtaaccagttgtttttctcttgatactttcaaaactatttgtctttgacttttgacaatttgattttaatgtttattggtgctagaattttaggagttcattttacttgttactttttggtatcttggatctagatgtccatttccttctccaggtttggaaagttttcagttattatttctttgaataactttctggtcctttctttctctcttcttctttaacacccataatgcatataagtcctttaagttttttttaaacttctttacattcttttctctttttgttctctgattgagtcatttccaatgacttgtcttagcatttgcaaatccttttttttttctgcttgatctagcctgttgttgaactcctctagtgaatttttcaatttgatgtttgcactctttagcttcctaatttttgttggcatttaaaaaatatttgtatctctttgttgaaattgtcaccttgttcatccattgttacattgaccttggtaagcctctatgacagctcttttgaattctctcttaggtaaattatgtaactctatttctatcaggtcagtttctggagagttattttgttcctttatttgggacatctttgcctgattcttcattttccttgactctttatgttggtgtctgcatattagattgattatttatcctggtcttcactgacttcttctatacaggagacgactcctaccaatcagcctagctagaaattctactaactctttccctccctagggaaaagcagacagctgtgtttctgtctgcttgctctgtgggttgagccaggaaagggcgctatagtgtctgccaatccaagctgccacgtccactctctcccaggctgctgactcatccaagctccaagactggaaggactgagatcacagtctgaccccattcaggaatgcttgcatgctggatgcacaaaccatccccttatctcccttgggtctcttcctggttgtaaggccctgtgtcaggtacagggactccagtgagagagtgtcctgaatcccccttacagctttagtgagtctggttttgcagttgtctggattgtgaaatattttcacttaacttctagatttctcacaaagggaaattgtccatgaactgttgctgaattggtgagtttgtcaggaaaaggatggtccagggcttcctagtcctctatcttgctgatgtcactcttttggttgcttatgttaggaaaagactaagcaaaataccaaccattgtcaattctagccacggaaattaaaggattttttaaaatattatctttaattttatgtaatttttaattttaaaaaataaaataagacttcaaaaattgttatttaacagtgtgattgcaattcaactatatttatatgcccacaccttcacaaacatatacataggagattggaaacatgcatatcagactttaatagcaatgcttccacatccctgggatgtaaaatacaaccacagcaatgaataccctaccgaaaggtaacacaaatactcagaatggtaaactatgagtcattttattttctttgcaaataatgtgatgatcgcaaggagaagaatcagaaatgaaactttctctagctagataactgcctagtcctttggtgagttcttagtaaacaccacctctgcttttcagactgtaattaataatacaagtgatcttattagctgctcagtaaccctgtctacaatcaacccatgatttagatcttgttcctttcaattcttttttcctctaaaattctggagtttaagtcttaactatttgataccaatcttagtgtttagaaagggacatccttcagcgcatcagccatgctcatagttatactgataccagtacataacaggtgataaaacaggtaatgtccccttagagcccaacaggttactatatatgtagatgcacatatacaagatacatagaaaaaaaaagaatatgcaactcaatattgttattttgccctgtcttataaaagcagactttacctggtgtctaagttatgtatgcatgaatgccccttcaggttgaatttccaggctttcaacaatgaatttatagcactgacttctgcatacaaatgtccagcccacttagcttttactgtgatgtctcctgtgtctgtttacaggtgcaattagagaatcctattttccaaactgagtttgctgagttgaaagtacagtcctcaaccaatgctttgagtttgcaaatcatattccaaaaaaaacaagttcaatgtagccaatgcctgaaagaaaacaatagcagtaaattctgctacagatgaagtaggatgttctacatccgtcactaagcaaaaaattgaaaaataaaaaataacccttggttccttcttaagtcctaatgctaactggtctgcatttgtggagctttataacaaagagcttttgtccacaacttgtactcattttaaggtatgacagttccaaagccttggtaatgtataagccatccttgttgaatgtaacatattaaacagttcactaagcttacaatggttcagaatgttaaaaataaaattgtaccagtagctctgcctgtctttgtgccaaagcagtacaaatgatttttgaataaagaaaacaacagtgctcatctgagcttgctaacaacacccaatgacacatgctgctgtacaatattctgactctatcttgaacacccattagggagcattatcatatgcaatattacatattcaagaactgacaacaattgatgcatggctggaaaataatatgatagcaaagtcacacttgggttttaccctctggagatcactctgcaggcttaatttgtgcttctccctgaatcaacaagcctcccacacctgcccctttcccgctatattggaaagaaaaaaaaaagcaaaattttaagaaataaaattagccatttatttctaaaaggatagaaacaactgaaaatgcaccctgactttatctctgccatttttctagggcagacagtaatgatcaactggggggaggcctatattaatcaaacaaatgtggtaacacagagtatgcgtcatgacatcatgggtgctagcaaagtctccaggttgtctatctacatcgctcacttcctccaatcaagaactcctgggcactttagaagtacaaggtgactagaagtttgtttctcttgggaagagtgttttcatcaccaattgcaaattcacacgcctcagtgacttgggtggcctttgtcaaggagacaggcctgtcaaacaaaggagacagggaagttagaatgaatatgtgtgtgtgtgtgtgtgtgtgtgtgtgtgtgatgagggaggctggggataatgagagtagttgcacatcaggcatgattttaagccatggtggtaataacagcttatgggcaagtggcaatgtaactgggggtgtgcagaaatgccaaggaaaacccttgattgaatgccctttggaaatcagaggtctctcctgctcatggtttcagggagagagcaccctcctatccccaaaagttcccaggacctgaagaattcatttgcactcatcccattaagagcttttgctcagtacagtggcacatggggacaagttgttctgagaaagacgatcgagctctgatagactgagacacgctgaagacagagttgaatctcagcagtctaatgggcccagtgaggcagtaaatttcgcagcaacttgacacattaatatagaagtacagtctgttatatcaaagggagattgtcttagtccttaaggggaaaccagcaatccaaaaatgaaaagtgtgcactggcgacttgtgaaaaatgtagttaacactgagagctgaagtatagagctttacgccttccctggtatgagttctcatcaagggcaggctctggtccctcctggagaccacacaccccataacatccacatctcctaaccctggctcttagcaaccttggcatctttgcagcctgagagaaggggaaccagcaaacaagtttttatttggtcccatgggacaacgcaggctctgtctttctaacgctgtgttttcccttatgtctttgtgccaccatagcagcttggagcacatttctgtatgactccgcaggggggaaacccaacaacttaattatccaataatagggagacatattggtaaattacagaatgtccactggagaaatatgacgaatctgtttaaatgatctttataaaaattaaatggaaagaaacatgagaagtatttatgatttaatgctcaatgaaaatgtagactacagcactgtcagaatagatgtaaaatcatgaattcatagcagtcaggactggaaagtaataagtgcagatggaactagttatgttagaagaaagagattatgcagggtttttttcattttcaaattcatttaacaatgttgtaacattatattcttaaggtgtatatttttaataaaccagaggaaataagagctaacttaatttattaacaccttttgcctttcttgcttagtaattatctaatactaatactttcagcacacacatttaatcttctcccaaagctacagccaaagtataactggagacagaaggtgctttagttcttacacctatggttctatccggttctatccttcctacctccctttactcacttctcagtggcttaagagttaaacatggtccttgtataatagaaaattcatttaaccaaatcaatgtgcactggtctgcagaagaattaattccataggggcctttccatccttctttttattttgttttctttttgcttcatataatgctctgaaagagatttaacatgagggtaagatttgattaaatgatcctagcagcttggggtctgggggatttgagtcctgtccagaccacgtcttatgtactttggaagagggtctagatgactacacatctggagcaacagcattttcagtctttaaaaggaagaggtctttaatgtgatagaattaaagtagctagaggcaaccaagcgtgacttgccccaattcaggtaaatgctgttccccacaccaagaattacatgatgcttcctatagatcatcatgaaggtgaagcaacaatctcccagttacatgggttatagtcatttaatgatttaattttgtgtttccagctatattttaacttcaaaaatagccaagcttcaatacaactaaacaaatcaaccacatcctgtcccctgtgtctacatatgcttttagtccaactgaatgcaaaggacctagtcaggttctataggtgtcaggctaactgctctcctatgttttggtttatttgtgattgtgtataaagttacatccaactggatgggagtctcccaggaaaggaagaactgtatctcacctactttgttcacacataggtaacaaaatttgttttgaaaagtaaattattttgctggcctctgatggctaagcaatggggatggggcagaaaactaaggcagagaagagagctcagctctgaatcctgtcccacctccctacatcttaaacctgaaaatggacttaaaaaagttcacatatttcttatgaataaccctaacagacacatacttttaggtagagaaaactttttccttttggactaaagattagaggcaatgtctgctgggagaaactgggctgcttctgcttgactgccatgaggtctggggttgctcctggcactggtggatactcggaagccccagtgtattatctcaaggggagggaattccaaggcattccaggtattcttatgaagacagacacctgcccatgataaggaatgacttgtctcaatcccggaaacatgggtagagttgtaaacagtcaacccaagaactgcagcccccagtgaaacaaactgggctcaaattactaataaatcatctatatctcagggcccagacagagctatcttagcatgagcaataacagaaagaaatgatgggacaactattcacacatactttgtgtgtgtgtgtgtgtgtgtgtgtgtgtgtgtgtgtgtgtgtgtgaaacagagagagagagtgcctgcaaaagacaaaggatcccatgtacaattgggaaagagaacaattttatgataatttctactatagaacaacctaaaaacagtttattcaataaaatagaagctaataccaatgaaaggacattgaaagaaagatcataaacctaagtaaacaagttgaaggtcaaacaatagacttggagaaaagatataagaactatcaagaaatagaatagacactgctaaaaaatcaaaacgcccacatagcaaaaaagtttaaataatcccagtgatgcaaacaacagcaacaatataaaaataactagattaaagtatgcagagtatgcattttggaaaccactactacacatagaaggcagtcaatgataacctatagtaaggctaattggactcctggaatattcaactaaacaagtgaaataaaagatgttttcaaagataagatacaagaaaattttcaccaaaatgaaggaagaatggactcttaaaattggaaagttacgaaagtttccaggacattttgatatagagtagtcaatatggagatatgctttccatttaagccacttaatttcaaagataaagaggtaatcgttcagtcatgcaggcagcaaaacgaatcatctgcaagaggaaaataataggagtgtcttcagagttgtttttttgtttaaggtttttttttttttttttttttgatagggtcttgctatcacccaggctggagtacaatggagtgatcatagctcactgcagcctcgaactcccaggctcaatgcattctcctacttcagcctccagagtagctgagactatagatgcacaccactgtgatgcaaaatcaataggaaaatgtctctacacttttggggttttttggtttttttgttttgttttgttttgaaactgggtctccctctgtcgctcaggctggagtgcagtgacaggatcacaactctgcagtcttgacctcctgggcttgagccatcctcccacctctcccacctcagcctcccaagtatctgggatgacaggaatgtgccaccacacctggctaatttttttaaattacagttttaaaagaaagtttgtttgatccaagattattatgcttaggctattttttgtttgtttgtttgtttgtttgacatgaggccttgctctgttggccagactggagtgcagtggtgtgatcatggcttattgtagcctcgaacttttggcttcaagtgatcctctcatctcagcctcctgagaaaccgggtctacaggcacgtgccactgtgccaggctaactttttattttttttatgaaattgtgggtctttctttgttgcttatgctggtattaaactcttgactcaagcaatcctctcaccttcgcttctcaaagtgctgggattacagttgtgagtcactgagcccagccataggctgattttttatttatttatttactttttgaaagagagttttgctcttgtttcccaggctggagtgtaatggcgcaaactcagctcactgcaacctcctcctgggttcaagagattctcttgccccagcctcccaagtagctgggattacagtcatgcaccaccatgcccagctaatttttgtgtttttagtagagatggagtttccccatgttggtcaggctggtctcaaactcctgacctcaggtgatccgctcacctcggcctcccaaagtgctgggattacaggcatgaaccactgtgcccggcctataggctgattttttttatagttcaccaatacagtgtcatgtaagcattttcaaacaagaaaggacttaggaaatgtggcatctaagaataaaactctacataattccaaaatttagcatattaattcaaaaatcaaaaaaagtaacttgacaatatagaagacaagattttaaaaaaaacagatggttaagccagggccatttaaaaaattacgggaatttgtggctaaagaacaaaatgaggagtttatatacctgaatatatacacataaaattaacagatatcaagtagaggtaggaggagcaaagatagggtaaaatgcaaatatagtagtggtatcatcttcattggaggcaatcaattgatgctacttaaatttaaagcatttttttattaaaaaggagacctagatacagggaagccaatctattaatgatttttcacaatcctatcctcttaacagtagagggatattttaagacctaatatgtttatttgaaggtcaattattccttcatttgcacttaaatttctttttcttttttgataaatttaagtgatcaatgagttaatacttttatttaaaataaaatatgattttaatttcataaaggataataatccattaatctacagaactagctagttaactggattctgtttatgtatgtgtgctgctctctgtaaacagagatgactgtgtgaaatgtggttacagaactgggctccctgataagagtgaagatgatcagatcccaaaataatggttaacagattataggattccccaataatacaggccaggtaacagttgtaaaataaaaactttagacaagttaaatgtaacaatgtaattgggcaaagaatgatttgcaaattggcaagcccttagagctgaaataagttcaaagtgtctctgtgcctgccacatggttagataacatttatcgacagaaaacagaaagtagcatacagaaaactaaagtaaggtatggaagcagctggactggtgacacccatttgccttatttgaacagttggctgcctatgactggcccagccttcataggctgtgattggcagactcgttacaagagtaggttacagtctgtctacacatccagttgacttatggttcactatgtatggagacatctttaggccaaatctaaattatgtaaggaggcagctttgggttaaatttaaattaacaattctccacttttggtcaacctctcaattttgagaggttggccaaaactttaggcatcgatgtcactctgtctcattcgtgaatggactatttggtctcaaattctactgggaagtagcagaacagagggttttgcaagatgggagcaaggaaacagacaacagaaaaaaaatactgattggttaatatagggttatttaaggttactttttggaaaggttagagaagagggacttccttatgttgaaatttcctgttttcagaataaaaaaagaaaaaaaaaactggtctcttttgggatttatctgcttccttaacatttcagtttgattacttgacatttagcatgaatgactccattttggctttctctggcctatcatggcctagtgcataagctgagtccaaaacaacagccccgataattttgtttaacacagtgataagtcatcaaaatcaagatcgggcaattgtcacaatgagtgacatttaagtgtcactaaggatgggtcaaatttttcaagacctatggagatatggactaaaacatgatgtacttagagccaagagagatgagttctgcttaatttgtacaatctaaagaaatcagggacaaattatcagaagtctgaggatagttaccgcaataaaacttaccatctcttgcccagtttctggatcttaaatagttttaagactcagaatccattgcaggaaacagagctggcaaagatttcaatagaaattccttcattccttcctaaagggactgaaagccattttctcaaacatccacacatttggaaaggggtaagttgttggatgcagaatctgaattgacattgttactcaggatccaaagcatcattacacctgccttctagaagggaggtgtgggggagacagctggcttcctctcccatgccttgtgtagggtgggggcactgagtccacagacccacatggggatcatttcagttcccaaatgtacaataggatgggcactgcacccacattgtttcatttgcctattaacagctaccatagtcgggaagcccaagtggaaatctttgtacatgcctctgccccatccctaatcaaactagcaagtaaaagaaaaatgaaactgcatctctgagattctcaatttctgagacttaaagaaatgtgatatttccctgttatatccccatgtacctctgaaatttttctttctcctacacaagtcagataggtcatgtgtgattacagtggactgtcacaaacttaaccaaatagtaactctcattccagctgctgtgccagatgtggtatctctgctagggcagattaaaacagactgtggggcttgttatgtggtcagtgatatagtgaatgcatccttttcctttcctatcagaagggaaaatcagaagcattttgtatactcctgggatgaacaataatgtgcatttatggtttgtcccagggctacgacaactctccagctttctgacgtattccaaagggacacagactgcctggacacttggtagaatatcacattaatctactatatcaatgacactgtgctcaatagaacagatgaacaaggagtggcaagtacattggaggctctggtaaggtgtgtttactccacagagaaggaatgaaccctgcaaagactcagaggtgtatgatatcatgaaatttttagggattcagtagtctacaacattctaagacagtctctcaaaaataaagaacaaattattgcatttcttgcttcccaacactaataaagaagcacaaggcttgggagccctctgcaggctctggaggcagaatattatgcattcgggcatatgcattcgggcatactaatatgatttgtttactgggtgacatagaagttggcagcctttgttgactgagatccagaatagaaagctgctctgcagccagtccaggctgcagtgcaagcattcctgaggcataagccaaatgaccaacagacttgatgatactggagctaactagcatggggaaagatgcaaagtgaagcttatagcaagcactaatagaggaatctccacaaagattctgaggggtttgcaaaaggacataacatctccaacagagaactatacatcattcacaaagcaacatcaataatattaggtggtttaggaagagacaaactatctgcttaccagacatcaaatgactgtagtcagagctgtccttcatggtcttgattcttcagacacatcaaatcataagattgggcagcccaacagcaaaacatcagaagattaggcaaagccatagtcagaggacacaggaggctgcacaatcagttagcacatttacaagctgtccatcacgactgcaaatgtgcctctcccccagcccacaccagtgatgctgaggatgtgaccagatgttggaggaggacaaaggactttctctattcatgcgtgagcctgagcattttcttcagtgacagggcatccttcacaatattgccttgagctagagcacccactttacacctaagggggcactgccatgaacatagggccatgagaattccatgattctaccacattctgagcttttctaaagctcctcccctaatggaattgtgagtggcttcttaaaattgcagctgaggtgtcaacttggtggcagtaccctgtaagtattccattttatggggctggtttctcaagaggtgaaatgcatcagtacagagaccaaagagtagaagtaggagctaccctgattaccatctaccctagtgattcacttgagaaacctgctcttcctgttcttgcaatttcaggatatgagggtagaagttatggttcccagaggtgcagggcctccccttggggatacagaatgagtcccaccatactttacattatagttgccaccaggccacttaaagctcctcatgccgtgagatcagaaaaccagagaagtcaccacattgatagcgacaattgattctgatcaccaggatcagaatcctggtggtagggctgctttcacatcatgggggcatcaggtaagactatgtttgggatctggtggttccctggggcagcttttgatgtcccatgtccggttttaatagtaaatggacaaacacagtagccacagctgagcagatcatagaaactaggcttcagaccccacagaaatgaggttcttggtcaacccacaaggccaagtgtctagaccagcagagatgctggctgagatggggggagtctagaacagatgccagtggaagaaaaataaaaatgatcaatcatagccttgtattactacagcaatggattccacagtccatccctctaacctaggaaacaagaccattccaaaactttgaacagctgttcctagatgactgcaattcctctaagaagcaagcagatgtgagcagctctgctccagccccttctttagggatgattcactgccccttggctgccaggaatacccactgacagtagctcagaactgagtttctctatgggaatggcttttacatgtaggacttccatgtgtaaggctgggcccactcaggagagaatccatggccagtgtctaactgattgaggaaaatgaaagtctcaccagggattggccacagcttcacctgtagccaggttgtgcgtcagcttctctttctgtccggttctgccttcttcacttctgtacagatatatctcccagaagcacttcccaataaactctcggcaagcaactctatctcagattctgttccaagcaatgcaatctaacataatctgcccaaactcgcatataactacaatgcaacactgagaaataaaccttcattatgttgagtctctataattctgggattgtttattagcacgatatagcctatcttggtttgcatttgatacgcaataaataatgtctatggatccttgaaagtgaacataacctccatcagttatgaaaatttggtacaaagatagtctgaagaatatgcaatccatctaatattctgagtatcatagattttagaatcaaccagacaaaaatgcatagaaaccattgttttataccaaaactcccaacttcctctacactgtttaatccctcacccaacaccactttaataaagaacactttggtatttgcctacagtttccatgtggatgctataaaaaaaagtagcccattgaacatctctattgttattttttcattcaacaaatgtttatttactgtttattttgtgccaaatactgagaactagaattatctagctgagattaactgaatcatgatccctgtcctcatggagaattaaacaaacaagtaagtgaatgaatagaaactttcagattctgaaaattgctacaatggaaagtaacatgttgctattcgagacacaagaagataatagattttggactaggtgatcagagaaggctctctgaggaggtaacatttaagtgcaggtttgaaggaccagttgaagtaccaggcaaaggccgggtgtcctaggccactaggatacagtggagaggaacttctcctttgtaagcttaacccaggaggagagaataggagaatgggcagagtgactggagcatagttaagaagacgaaaagtggagcaagatgaattggaaaggaagtctcttttgcggaggagaaattttccttagatattttttctgggaagttgttaaattttttatgttaagggccagagagagtaactagtacagtctaagcatcatatgctgtttctgtagcttattcttctgcatgtttttaaacaacacttgaacatgtaaaactctccttggctcatgctttggccagctgggcttagtttgctgacccctgacctaagtgagattggtgtgtttctatttatgggcaatgcagatcttttaatgaccttcttttcctctttgcctcacaaatcaggaaactcacagctgaattcctatcttcctagttctgcagggctttataacatttattttaatacataaactgcatattcttactattcaaattttatttcttgatatatattatatacataataaagaggtctggatttaaaatttattttatatctttctgtaacctacttcaaatattttttgaataaaatgaacatgggtaaatgaatggaaggatgaacaaatctaaggctaaaacaaaggtgcctcccccaggaccacatctacacagtagtgtgtagtacagtgttcatttcacagaaatgaagaaaatggatgtctgaagcagatcatttaatcatctatggctttcatgttggtaatatcaataacaataaccagaggaatcatgatttttcagcatctgtggtttataaggccatgttatgaatgctttccatggacggttttatttaaaattctcaacatctccatgaggtaggtaaaattcacgttttacagataaagtcaaacagattagaaagcttacttagcactttagtggaacctaggttttcgtgactccaaagactctgctcttaaccatgactctacatgaattaaacaaacggcacacacgcatgacaccagcataaacaatagagcagttaagcggtgaccagggtcccattgtgggccactgtccaacacatcaacatccctttgtgtactctgcctgccgggtgccctttcgtcctggagattctggtttccttgaaaatttatctgacagcttgccaaacactaaacacactttttaataaatgtatattttttaagtttataaggctaaggtaattatctcagcactttccataatcctctagaagaaccagtatcttccagaaacctttgaaaaacaacctatttaaaaccaatgtcccctagatcttagattgcctgtatttctcctcccttccgtcttctctcctgctcagatttgcacaaagcaagattgttgttcaatgagaatctctctccttctgttagttatccccggcctgaggctgtataatctcctgcatgtgatgccacaatcatcgcccccctttggagttgctgtggaaatgattatggcgccacagacagagacgggtgtgaggagagcactttggagaaatgcagatccttgaaccaggcaggtggctcttaatcccaaagactgggagtctagacacaaagccattttttctctctctcaagaaatgtgtttcatataccaagtggttcttaaattaaacactaagaaatctgcttcattacttgtagagtaaaagaggagctgtactttgtaccttttatgtttgacctttccatcaatttcctttagcaatattaagtacctgattctccaagttctaagaggttggatacatggcaccaggatctaatgatctaatcacaggatcagggagtttgtcactctgaattttaatcctccactgtgctgagaaattttcatatcgccttgaacaagcgagttcatctctctttgtctcagtctcctcatctttaaaatggtaacagtgaggattctgcctccacaggcacctatgaggattaattagttaaaataaatgagacgttacgtagatgctgagtacagtattattttgtggtttatcagaggaataaaaggaaacatcatccctgcatctctgagaaatattagcacatacacatttcactagagacatttatgtgttcttgtgtgtataaagataggaagaaagatggatgggtaaacagattgatactatatagtggggataaagctgtgcccagttttgcagtgtagcaatcaaacgtgatatactcaggtgaagaacaggcagtgagaggagatgaacactggggaagaaagtatagattctgtttctaggcaagtgtccttaatagtaaaaaatgaggcagcagaaatacagaaaatgtgtgtgatataaacagagttgtttccaaatagaaagctatacgaagagcaatatcaactcatcaagtcaaagtgagacggaagcctctctctaggctttgtctaagtgaggaatattttccaaaggtctagggggccacaagctgcttttcaaagtgtgcatgttttgcgggtatatcggcacaggcctgtgcacgtggaggcattgtgagagatggaccagttcattgctgtaccttggagcctgagggaggggcatatggagggagagatctgtggggaaaaattaaaaacccaacccaggataagccagggtacctggctggtatctggaaaaaaaatggagaaaatggggatccaagttaccataataggttgagagacagcaaagggccaggggcctcaactgctggaatactggtgactgtccaggcccaggctttgccaagactttgagctgtctgatgtatataaactagtggtttaccttgttgggtgggtgacggggtcctccagtgagtgagcatgcccatagcaagagacctgcagtgcaggaccctccttgacatgcttggcttaagctttctgagcacaaccaggattcgtagaccagagctcattcttggttacatacgtacctgcattcattgtatgtttcccccaaaaaaaggagtggtccagaatgtacaaagatcaaaggaagacccaccaaaatcacaaatgattgatgaccaacctcttggtctaagacctagtaattctgtgtgtacctggaacgtagtaaacacacaaaataattgctcatttattcatctaacagttactgattttccattctattgtaggtgtcaggcgtacagcaatacatagaaaatactgcctttctcttcgaggagagagcatgttcacggagttctggagagtgagaaatggaaaaaaagcactggaagacataaatagaaatgacaataattttagacagtgatggggtaattaagaaagtaaaagactataaaggagtatgaggtatctgaagtctgggcaagaaagtcagggcaggtgtgcaggaaaacatggcactgggcaggagcctgtgtgaaggtctgggaggagaacattccaggcagggtgaagagaaagttcaacagccccacagagggaaacagcttggtgaattccagaaccagcaaggatgtcggtgtggctgggaaaggcagctgcggaggagagcagtggaaggcgaagtggtggaggcaggcaggggcacctcactcggtttcctgtagaccatggcaaagagcatgcattgtattccaaacacaatcctcagtcggtttcctgtagaccatggcaaggagcgtccattgtattccaaacacaattagaccacattcaagaatttaactgcgaaataattaaatatgtagcctccttcatatttaaagaagagatctgctttcaatgttgaaaatggatggaggtagaagctgggcagaaaaagttagagagaaaaaggccagccagcagactgaacagatcaggggagagatcactgagatcattgtagcactagacatgggagagaaatggagagaattctctgagatgaagtttagaggtacagccaacagaatcacctgtggcttgggtaagagaataaagatgactcctaggattagttgaacacagaataaattaatcaattaatggttacaacaagcaattaattaattactgatacttgtcctgtaaccatgaaaaatcaattctaggagaaagaattatttaatggattacaggaaaaaatgatgatcataatgatgaacattttaagaggatttgagagtgctcaagagtgcagcaagtgtgtaaacatactgtctcagtcaattttctcgtaacagtaatgaagaaagttgtatgtcactgcaagcttagaaagattaacaaatttgattaatgccacacaaataataaagagaaaaacaaggatgtgtgccccctcctgtctgtgtgcttagctatgattttgttctgcttcaccatctataagcctacaaagcaacatccaaaggggctgtgagtaaatgcaaacctacctgagctgaagattctttacccttgagataaaaaggcaggttaaaaagaaaatacataaggtcataagtgctgaagtagaggaaggttaaataattattaacatgacatttttcacttacagatttgccaacaatatttttaaataataacatgcagtcctggagcagatatggagatattgctatccgatgctgtcaataaatcactaaatttcttaagatatatgcatgagaaaagattgagaagaatataacaatagctataacaatgagataatggagtaatagtatgtatatatttaaaatatattgaaatgtatgcttttataattttaaaattaccatttacattcaacccttttgtaataatttttatatctataaatttctaattcaaaaataattttgggtcaaattatgaataccatattcatttcagaatgcaatacataccacatagctaggtacagggagaaaaaagcataagttttcaaagggatgggctggttttaactcaagaaagtctattggccaagggtgaatatccgattatatcaccatgtccaaaataggtatgaaaatctaagctggtcaaatctggggaaaataacaaatggtctgatcttcataaatgaatgaatcaatccatcagtttagtccaatgcacttattttatacataaaagctaagtccacactactagttaatggcagagccagaattacatatgatgtttcttatcactcagatttcccaaccccgagttcaaggcagatatgctctatttcaagacgtgtgtgtaatacaaaattaaatcaaaattttaaaatcatcattgagttgttgggctacattttgacctgtattggaaagtattattttcaatgtatgtaattagagttctgtctctcagtgaattttgtctctctgtgaactgagagactgtttttgctggtgatgatggcctctgtttgaggctgtgctgcggtttgtgagagagctgagaaaaaggtggtacatcaggaaaggggagggggaggtcggggaggtagggaaaaggcatattgagaacatgatccagggagaggaggattttaaaaagtaaattaaaaaatatagcacgttgtgcaagtaataataataatatttctacagaaatgatagtggaatggaatgggcccagcatcacataataaatgtgtccctgtcctgctgtatgaaaatctgtgggcaagttattaacaagcagatggtcctctctgctgttacctgtctgtaccacaacacttttactttctttttttcccttttgctgaattgcaagtttccattaatgaaaactctgaaaagtctgaaacctatttcagccctgggagctgcctgtagacaatcaactactgcactggaaaggtaaaggcatctgggggagatggggcatgtgttgatttcacagactccacagaactctctgagccccacagttaggacctgtgcatccagaacaaaatagcaatttccgtccatgacatttaaaggtcttggaggagatcaacaccagcacttaagctgttaaggctcagggcatcaggaggacgtggcagaggcatcagccatggaagtttttaattggcttgctttcttgggctatgtcaaatctgtgtttatgttgcttatctctggaagtgacaagggttggatcagctaagagccatggacagcatatgcctgaatttgatttggctgtaaatcaaactagctttttctaacaggtacttaccctctattgtatttggctacaatttcaatgagtaagtgatacattgttttagttaaaagaagtagctttggaatcagttagatctggatactgtccagactccaccacttggctgtgtgacagtgagcaagcaattcaacctcccagagattggattttcacatacatgacataatcatgtcatgtccatagtggctttgtgcagactgaatgagaaaataaagctaaagtgcttatcatagtgcctgacacaaagttaaataatcaataaaatttggctactgttattattgtcattattatgcctggacaaagtaccaattgcaaaaatgcctaagaggccagatgggtttgaacagacatatgtctgccctatctatatttttatttctatgtgtctccctcctttcttctttttctttttttttaacaaaaactgtcagttggagttctgccttatacttttgtttatgaacatttattctatgaagacaaaacatctcttaatttttttgttggggccagtaaggaaagaaacatagaaagggagaaaatgacagacagagaagtttgcatatgcatgcacccctagaccccaaggactagagcaaaaacctctaaggacctactctgtcaagggttgtgttgtgtttgtgtgaaacagtttgtagacaacagatctaggaggtggggaggacagtcttttgcttctgtgattagtagacttgttacctaaactgaacagggctcctagtcttgggaaaactatcttctttactcttaattcctaagcaccatatctatctttcccaaagtatgtaaaaatgacctttggttgaaaaagtagagcaaaatggagccacaggaattggcttcccattgaaataggtatgtcataaattgactagattgtttaagagcatcctagaggatataatccttcttttcaggtagctgagctacagctggtatttttgcttacacagatatctacagcatacctccttgaagcacttgaatttctagtagctatatcaccaccctcacccccaacctactccttctctcatatagaatctatgtagacagcaaatagcatttattgagacactatccttttggctaaatatagaacacaagacatgtctactcatacagtgtgataacatttaaaaatcaaagaaagagaaagaaccaacatgccactttgtgaactctaaactgttatctttctattcttctaggaactttctgcagctacctcagcttaaaaacagcttgatttagactttattactactccatttcacaatatgctatgtgcaaaggtattaaataatgaagacatattttctcattgttgaatatgatgaataaagcgaaatgaaagaggataacacagaggcatttagaagagactgtttaacttgtctctaaaggcttttaacatatggctggcatatatctgcttgccccgtgatgattctgacgatcttactggcctcttattcttgactcttttctgctaacaagctttggaatagccccaaactttatcagatgcaagacaaatgaaaggaaagatcacatttcagtcaggacttcgatctcctcaaaggttttgtggtaacaattgacagtgactactgatattattgattaacacgaggtctgaaaagcacgaggtttgcatagaacacatgagtgacaattgtgatggtaaatgctgtcatcagggtataacagggaaggcagggcttgaccacggctgatcctctagagcagatggcttcacagctgcagaatttttaaatttatatgtataggatacccaatatttggataaaatatataaggataaaacacacgtaacaaaaatatcctttatctgtgtatgtatgcgtgttgtttaacacattacatatacgcattttaatgtggcatagcttccttctattccacacatttgacgtgaattttccttaatgtgctaagcctctacctggaacgccctcttgtttcttttccactttactcatttctttttttttcaagacccagttaaaaggtcatatcttccacgaagcttgctccagcaaccctcgctccattcatagttccgttctttctctcattctaccaataattattaaacatataccaagtatcaggcattgtgggaggggcgtaaggatacagagaaaaagagacgcaacccagtctttgctcacctggaattcgcagtctagctctcttccatccccgtattagcaattgccaacctctttcctaacatctattgccttttattgctatttttggtatgtgtctgtttcacctactaggctattcacttcataatgttagaaacaattaaaaattatctttgcattgtgaccccttgcaggctacctggaacatagtagacactcaatgaatttttttaagtcgaggcatgggagacacgcagatgctcaatatctcaaactattacaataatttccaacgcacgccatttctataaattaaatatgcaactaatagtcaccatgaaaacaagtatcaacacattctttttaacaacaaaaatctatcattttagttcttagcactgctaagaaaatttcatcaacactgtgtaatattaatccgaataagttggtacataatgtttggtgtgtcaaaaaatagatttgcactataatttgtttctcagaaaggccatggagagaagtgcaatgagaatgatctgcctctgaatttaatacaaatcactcccttactgatcatcctttatacattgaaatttgagtcacttaatagtctttctcccatggttcggtcaatatttgtgagcatcttctagtttatgttttttttaaaaaaatttctctgctggatactgaagctaaccttttaaaaaatatatttggcttttatgtgtgagattgttctctctcctttagctcagccctgagttttgaggaagaggctttactagttccgtgatcaactttgtcactattcagcagacagaaaacctaagccaagcatggccatgtgcagtggttcatgcctgtaatcccagcactttgggaggccaagttggtggatcacgtgaggccaggagttcaagatgagcctggccaacatagtgaaaccccatctctactaaaaatacaaaaattagccaggagtggtggcatatgcctataatcccagctactcgggaacaagtattctgtgggaggagaatcgcttgaacccgggaggtggaggttgcagtaagccgagattgcaccactgcactccagcctgggtgacagaccaagtctctgtctcaaaaataaaaactatgaaaaagaagaagaaggaggaggagaagaaggaggaggaggaggaggaagaaggaggagaaggaggaggaggaagaaggaggaagaaggaggaagaaggaggaagaaggaggaagaaggaggaagaaggtggaggagaaggaaggaggaggaagaggaggaggaggaggaggagaagaggaaagaaaaagagacaaaacctaagccaagcataaaccgaagctctctgacacaaaaatacaactccaaatggcaggctcacatctcacatttctcattttctgacaggctttggtgggctccacttgttatcttaccaaaaggtcagtgcagaagaagccccgagtgcctacacctagttgtatatacaggagtctatagttttgatttgtatattttttacatgaatggaatcatactgtacatattgttttgtcatttgtctttttaaaacttaacactattactatatatccctatttaacagcatactgatgtatttcattctttttatctgcagtataatattcacagtgaaattgagccatagtatatgcaaacatttccttttaggggaaaatcaggttattttctgggacgcttttggataatctcaatcaatgtttttcaaacttatgtaaccgaacaatcattattttgccttcaaatgaaatgttatagagctctccagaatacagtgcaatcaataaaagaagattcgctctagtcaaagatccgtttaagggaacaggtatgggcaggatctggagcccacagcatagctgtggggtgtccttctgagctgcttggtccatgtgctcctacagcaaactctaggcatcttgactgaaccctggtgctcccatgccataatttggaaaactcaaagaaccaggacaaaaagcttaatggtgctctgttctaagagataaggataccagaccaactggtccagagatcagaaaagccactcactcgggtggatatctttaaccaaatgttttcggccagccttcatctttgcaaagacgaagactctgtaagtgacaacactctggaaatagtcttcacgtaggcctaaatacgaagggaccaaaggccagcatgggtcttcccagcctctccatgtggagtttccttgcttattatttgagatgacaagtggctgtagtttattttgtatgagaggggctgtaagaagttttttattgcaacaaatttgtcttccaaattatgtttttcttaggctaaaaagaaaagtacattttcaactcctttgtacaccgactgactagtctgcaaccctgatatatgacgtgtgacaacaagaaaataattggggaccaaaagctattcttaattcaaagtgagtaatttatataatgttaaatgcaaactataagagtagataaatacccaggttattataacaggtaaatttctcaacccttaaatgtatatcatatttcataattttgagtgacttgtaacattcttatacttaggtgatagtaaatatctgttgattcaaatagttaactttttttttttttttttttttttttgtagagacacggtctctatattgcttaggctggacttgaactcttggaactcctgggctcaagtgatcctcccacctcagcctcctgagtagctgggattacaggcgtaagccactgtgcctggcttaaacagttaacattaatcaaatttgtttttcgattgccaatgtataatgtatatacaaattaaataatttgagggaattaaataataactgtcaagttgaacagaagaactgactgtaaaatgactatttggggttaaaaattaaaacaaaaaattctgtagcaccaacaactctctgtaaactacccccatgtgggcacagctgtgaaatggtttctcctgctcagaatgccctcctccctggtctgcccctcagcctcctcctagacctatccctgcctcccagagctcttattctgctccaggactgtatagagctccccattttgaagctccacctgggattacttaacaaaccaattccccacagttacataaccatgtatctcagattctttagaacagcccaattttaaagtaatcaatcttgctttccctagaaatgcactcatttgtcaaaacctgtgtcttgattagaaagcacgaatattatatccacgctaccacgtaaccctccatccttctcctcaccttgcatcccatcagaactaacattcattccaagaagataattaaaggatatctggtgaaatgaaatctcatcaagtggagaatgacttgaccagccatgatggctgtttatttaggaagaggtttagttcagatccatgagtctctgattccagcagctaggtattggtccttgaagaccttcctagcacccatctaactccacctaaactgatcatggatataaacaactcattaatttttctattttaaaagtttctttatattatttttctccaaatggagtcagggtgaggggtacatccgtttataggtacatacaaaaaggaaaactataagaggccatggcagtttggttgcacactacagttacacaggggcatgttcttgtatcaatatttccctattgttactaatgctcttaatcataaatattccatgcattctctattccctccaggcactatgattcatgtctgctcaaaaagacactgttctcacagactgccactcacaaccgttatgagagacagacacttcagcattcactatgcaagtgtttactgaattcacaaacaggagacagcttcacagagacacacatcgcagcagagcctcctgcacagatgtcagatttccacagaagcctcccagaggcacaaagatctcacaatggactatttttagtcctgataattaatattggaggagaaagggaggagaatgaaaatgtagctccagcaaaaaggcaattaccatcgacaccatatattctcacctacaagatgtgttattttcaaggaaatgtcaaagaaaaaccctcccaaacctatagattgttatactgcacctcctgtgaaaggcatttaatttttctcttttaaaattctaaaaatagcttggtttcgtaggttaatatagacagcctggattctaccagcctagattttacagttacaaaaaaattctgtttgcttctgagtcccggaaggcaagagtttggttctctcacacatactgagtaaccatgatcagcagttgtccaagagagccctggcgacaccttcctactcctttgcgtggggtccccaatgttgcattttaaaagcatttctccattcccctaaagtttcatggaaatcagttttgcctgtgaagacctgggcattgcctgtggactcacccctatctcttaagtaggatgatttgcgccacctaaattagatcccagtccatgaggagatgtagaacaaccttagcgtcccttgaggtccagcaatgcagtaaaaggaatcgtgggaaccacatggggcccaagtttgcctctgcatctcactgttgttcactttccctaaaccaatggcttagtgctcaggtcacggacagtagtgagttgcatcatgggggtccaccttgtgctttgactgcttaatccagttctctttttaatggacacctctgctctgcttgagatcagtgtcctctccttcttaggcttctgcgttttcctcatttctacaaaacttgtacaaatttagtctttttctgagagcttctctatttccatcctagtttgctcttcatctgggtgcctgagaaatgttggtgttctccaggaattaaccctcttcttcctaaatctgtatgtccagcctagactctcccagatttgcatttgtatattcacatgtctgccagtgatctcctactgatccatcataggaatctcaaattcaacacacccaaaactgaccttaatacctttttactttaagccagtacctactcctgtgcttgtatcttgtgctataatccccttggtcaccaaaggcaggcctatgtatatcttctgcagctccttgctttcatcctccacattcagttcgtcaccagttcaagcaatttcatctccaaaagagttcttaaatccatacattattctgtatctctaccatcactcctctggttcaaatccttatcatcatttgcctggataactacagcagcttcctaaactatctccctgtttccctgttctccaattcatcctccctctgtcagaagggtctttctaaatataatctgaactgtataattgcccagcttaaaaaccttttggtggtttcttatcatctgaaggataacatcaaaacttatcatagtgtataaatggtgcatgcttttctatctaatctcatgcttgcaaaaaactgtattcctacctgattgtactctagcaatactaaactacttgaaggtgctctcacatttcttgctttctaactctttaattgtactatatcttcctaattaactcatttacatcctgtatcctagatttagcaatgatcttgtatcctataagatccagcttccaattcctccctgatggagtcccccagcacccgtaatactttacggatactttatgctatagctctatcagtgaacttgcaaggggatgtaatccacaagaaagccaactccaccaggtcagggcctttatctccctcgccatttcatgctctgtgcctggaatacttgttggtgctccacatttgttagcaaatgattctaaatatttatttggaaagcaagagccacagtataaagatgagcaagagctcatgtgtgacctctgttgggctccatgcgtctgtcctcaacagttaaagaaagcccctcaaagtcatggagctagttgaggagtcttggtttgggaaccaaattatcccttgcttctttgtgtttattttcgtaaaaaaaaaaatacagggaggagtccgtgccttgcttctgttttcctctaatttcccttacatctatttgcccgccctcaaccctaacaggcccctgagcttttcctaagattcagtgtggagttcttccttctcattccagtcccttctcctggctcatttccttcattcctgaagcctcagctctcactcccttgtagaagtttccaaaatcatcagctccctctctgatgcccttatgaactctgaggccttttctaagtggaggccaggctgccttcctcctgaacattctaccaccaactcaaacaagactttcaaataagatttatcctcttcccccaagccacctctcttcatgactttcttgttttgtttgaaggcgccaacattcctaatcactcagccttgaaaaatgcagaatcgactttgtcatcttcttcttctctgcctcccacatttaatcaggaacaacagcctttttaattaatatgaatgtggggaaactaacaaagttttcagaaatgacaagtagtttggcttaattgatgtagagggtatagtgaagcattgatggcctgtaagaccaaaatgtaagcatacaatcagatgctgtggaggcttaaatctgagctaaggaacttggaatccattcaaaaggacattttgaaggtggtgagtatacccattataagaaataaattttagtaaaaattaatctggccctgacatgcagagggtttagaatggtggaaagggagtatttaaagttaaaatactaagaatcatagtgcagtcacacgccagctgtgtgacttggtgaggcattaagtttctctgagcttaagtgtcctctctagaaaacaaatgcaataatattgatcacagaagcattgcatgggctagagataatgcatgcaaatgcacctttaatagtgtcagaacatttgcagcataaaataatttgtttccatggttttaagaatgacaccacagctgggcacggtggctcacgcctgtaatcctagcactttgggacgccgaggtgggtggatcatgaggtcaggagatcgagatcatcctgaccaacatggtgaaacctcatctctactaaaaataaaaaaaaaaaaaagttagctgagtgtgatggcacgcacctatagtcccagctactcgggaggctgaggtaggagaatagcctgaacccgggaggtggaggttgcagtgagccaagatcgcaccactgtactccagcctggcaacagagatagagactctgtgtcaaaaaaataaataaataaaaataaataaaaaggacaccactaactggtgtccttccttcattttttgttttggctcccccggccctgagccccagctataacttagtctagtgtcaaggaatattgagattgtttctagacacactcagacttcatcaatgccataaagaatgtctcctatcctaaattgagaccacaacctccttgagaacacaggtttgtccatgtccaatctacatagtatagtaggtactcaacacataggaagaactcaatatacattgactgaataaatgaatgaataagtgaacaaatgaatgagaagagcaaagtccatggtttgccagtgaccagcagcttcctttcagctctggttaggtttccagctatttgagcagcagcatacttctccagctctgtgaatacttttgagttacccttggcacctgtaagcagatattttctggtacttgggtcctttttcttccttccaagtgtcctcaagtacactttaaagctgttcaaattggcagaaggaatttcgtcttatatcttcaaaagataaggtaatgagaatgcttcagtcctatttacattaaaagttaatgcctttatttattcatctacttttatggatctattgtgccttcgtaaatccatcttcagctctttggctttctctctggacacaattgcccttgcttaagccagatatatatagataaatgagcaattagcagccccaggaactgcctgctggggagacgctcgtcctgtcccacgatggcagctgtccagacctcccagacatactctgacttccttgacctctgccctgctcgtcttagacctccgctgcctgattcccctgcatttgtcagagcatctcctttcacaggatgatgtctgcggggtttgctttgtaatttgagggaaaaggcacacagtcagagggctttccaggaagagctgacccaggagggctgccaccacccccgtctcccacctccactttctgtctctacaccaagtaaagccatcctgcaaggatcatcctgcaaggaccagcctccaagcctctccccttttcccacttctgggccaatgggaccgtgactgccgtgactgcacccaggagccaattagggcatgttcctgaagttaggagatggcgaaaaagaagacaaagatacattaagaactagaatgaagaaaaaatctgcaagtgaaataagaaaaaatcccatggacttggggctggaattgataagtagatgagcagtgtctccccccacccaccgctcaccccagttctttttattatttctgttagtactgttagagccaatttggagagacagtatgtagaaattgcttcccaggggtttctgtctgttaggtttcagttccatgagtatgtgtggcataacttagagaaaaagggttatattttggcttctgatggaattttgttttcaggcagacttttcaatcatatcactaattaagtaagcgagtgaagttaccagcaccagcagggtgcttgagtcaccagtaggtgcccagcaaatgacagggcttggactaattactattataattactgattttctgttgttgttgttgctgttactgtgaacagtggaatatcttaaaagtcaactggaccccttagcctcttgtcattgctgccagggaagaggatgctcactgtgcatttggagcccccagccttttgtacagcatcatgaggttgggtggggtctctagagataatctataactggactgtaggttctttgaacacgaagtatggaggccaggatatttcccacggagcttttgtctctgaagggccaaacgccaccttgaatacattaggaggaactcctcagtaactactgactgggccacattgagttgggtcgggcctgtggttcctgtatccttgtgttctggaactggtgatagaagcccacagtgtatatttgaatcacacaaagaatagagacctagccttaaaccacctgcttttctatactgaggacatatcacacagtggctagggcatggttctagagtcagacttgggttccagcttcagctcggtgagttcattagctgtgtaattttaggtaatttgtctcatctaagtttcactttccttttatatgaatcaacactattgatagcactaccagaaggggtaaacaaagacttatttgttcttactcatatatgggtctcatgaagacagggattagattggtggttaccagaggcagagaagagtaggagggagtggggaagaaagggaggttgagtcgtaggtacaaacatacagttcagtagaggaaataagagcaagtgtttgctagatcagtagggtgactgtagtatacaataatctattgcatagttcaaaacatctagaggaaaataatttgaatgtttctcgcataaagaagagacaaatatttgaggtgatttgattaccctgatttgatctttacgaattatataaatgtattagatcatcacatgtaccccaaaatatgtgcatctatttatgtataaataaaaataagataaattattggaagggttcaataaaccaaagtatgtaagacataaaccacagttctctcagaaagcacatgctcaaatgaattctatgtgcttgactgctgtaagccattatggatccctgtatacttctagtcagcagccagctccttgcatcttcagatccacactctgctcagagacacaatactatgtctctgttttatcattctgaccagtccagggaagagggactgctatttttatttctttctaacactggaggctgttcaaaccctgccagtgcagcttgttttcttgattttaattaagtaaggctttacggtacttgcttcagtaaagcccaagtaatagagaggaggttagttggttgaacccagactccagggtgtcagtcccagctttgctgaagatgctgggcaatctagcttggcatcttgttgtggaagagaattaataaaaaatgattatgtcgctctttgcaaatatgacctgtagcaggaataatcaatggtaataatataggactggagcctctggagagtaaactaacctttaccagtgggtatactccaggaaaccagcccctcctgggtcttcctaagggctgcctggcattcagtagatatacaggtattccaaataaatgcacgcaattactccagggagttcctttgctcaccagagaatctgatcaccgcatcatccttgcttcctcctgctccactgtgtacctccagtgtgtcgtgagttccaatatatctgagatatttttctttcttttcattgccaccactttggccttggtccaagcccttagttcctttctggaatagtacaacaggcttccaactggtctctctgcctcccctgtcttactatgatgcaggccttctttcatactagtgtgagagtgacttttttaatacaccgagaactgacccatcacttctttaattcgtgtttctcatcggcttctcaccacatgcagaatcaatgccaaacccttctgtgcatggcatgcaagggcagggggtctcaaaaagaactgacatgtaggtctgcctattctgtcaggaattcaccccaatgacataacaaaataagttttattattattctcacatccggtttaaagaaaatgagaatcagaccattttggtagcttgtcaaaagtcttaatgtgaatacttgacctcacagggtctaacttcgaaggccgtgttctttccaccaggcctcactgcctcattcacaagctactcctggcaggttccggttaacatttccagccacagttgtttctctgcctaccctcatgctctgcttggaaaagccacaccaagcaacccacatttacccaccagcatgcaaatattcaggctgcaagcctttgcacggagtgctgtatgcttagcacaccattcccaccacgcttcctcttgtagggctcctctgtggctcaattcctgctcttcctttaaagagtcagttgaaatgccacccatccaggaaagctttctcagttccttgggcaaagttcattgttccttcttttgtgttactttacaatagctatcaccctttcattcatatacctctgcgttaatgctgcattatcattgcacgtgtttacatttcacctacctacctctcttcaatgcctgggaactgtctgatcgatatctgtatctctagtgcctggcacagtatagggagcatggaaggtgctgacatctactttagtgaatgagaataaaggaaaaataaaatatcaatcgcagaagttattcttttccttgtactgacatttgtctgtctctctaataaccatcacacacacacacaaatactttttctccttgtaaattcaggttacgttaacatttttcaaataaatttagcaaggaaaatgctaaatcagctctgtgtaaatcaagcaaccatgcttgtgcatgagaatcaattactctatatcccagttttataaaataacattcctactggcacctggctaatttataagctagcttaggaacacctatgcctgcatctccagcccctcctctccataatataacagagtgcttacatctagagggattactcagctgtttcttgaggttagttaggcaactctgccaaagccactggagaagacacaaactcctataatataaatatctggctgtaaatctcttgccagttacttttaactatgaaagctctatcagtttgacccttcagcagcacaaacctaagcttcccatcttcgttgatgtcatcacttacgacaaaacacactaggaggaaggggttgaaaccatggcaaagtgcagttatttgtatcacattatctcacaggatagttggctgccgaagagcactgagagaaaatgaactcggtgagagcaacttttgcaatcgttgccgctgaagactggcgctcggaactaggggagtgggtgggggatgctcgatggtctttgtcattacttgcagccaaagaaaccacatcattatttctgaaggagactctggccagacatttcatttgaaaactgtcattttacaaatgtttaattacttctcaaatgcaaaggatgactgcaaatttgtgatctgtcgtgtaagaagctatcaacctcaacctccttgagtcactggaaagaaaaacattttccatagaaaattaaagcagtttgatcactttgtattcaaaatgattgttctgtctttcctatggctttgttctctgatctcatctatacctcaggggagagctcccagttaaagccccatggtgagcaatggcttctctctcttcccactatgctcattcctgggactcgagatttactttagttccagctgcatgactaagaaatcacctgaaaatgaacttctgattttaattaggagaaccccatgacatttctctgggattctttgaagacctagctcatttggttttcacgtataaagtttgaagctggcccagtttttaacgggggtggttgccatttctaacgatgttgtatgttcattttgacagatataaatgagtaacttggtccctagatttagatgcagagaggacacagaaatgaataaggagaaatctttgcgtgctgtagctccgctggtctctacacctggaatgcaccccccagcaccacccatttccctaaccccaatccactgccgttcagttccaatcctcacttctccacacagcttcctgtgacacctgcaactaaaaataatcccacccttcctccattagatttcccacagctttttatctggaaaattctcccaacatggatagttaataaccatgttatatagttattgcttttttcttttctcctcagatagcctttaagttatttgaggacaaggtttttatctcatgaattttgtatttctccagagactagcatgcaggaggcactgaacacaaatgtgttatattaatgaaaggataaatttcctcaaattatttatattatagtggatgtgtgtggggagaaagggggaggaatacagtttgaagcagaaaaatgatgtcagtattatgagacggaaaccaggggctcgacaaattccaatgaaagaaagtcagtaatttaattggaggcagtagtaataattcaaggctggagcaacagctgttctaatctgcccaggactgaagggtttctcaggatgggaaaaaatgggacagtcccaggcaaaccttgatgaggtggtcaccctactcaaggccaagactcatttacagtagcgaccggaggagacgttccacaggaaaaacagcctgccacagccagagaagggttctgaccttggtgtttgattatatatgctgccagaaaatggtataataatttccttcaagtttttctataactattaagagtatggtaaccaggtttttacaagttttccaaaggttaaagaagaaatgatttgggctgatttatatttcatcaagaagaatgtaggctggatctcaggaagagttttctcacactaagttacctagaagaaaaaccaagtgttgtccacatccaaaaacctttttcccttggaacgaaacagctctggaagtattaactttttacattaatttattgtgaacgcaataatgaacatgcacttatgaagcataagtttgtaatataaataactgatattatagatattaaaattaatacagctttccattttgtagactaagtggcataatgagccaattctagctcacattatttttctcaagctttacatgaatagcagactgtgaaacctgttttatcttgagcatctcctcaatgtgctgattcagtcatactccattcatcagaaccaggaagatgtgggaggggagaatatcacagaggctggaagctgggggttgatagcagggcaaggacataagacaaatgctagcaagaaaaaaatgggtcaaattgggaataagtggtcacaacctaagcagaggcttgagaagccaaagcaggtaaaccagaaacaaatgatcccctatagggttgaggtgctgtaggaaatcaggttgggatgaagctgagagaagtgcctcactcacagccagagcaaacgtgcactagcaagcctagtgaagccttggtagatggttgggctctgcagtccggtcacctattttctgctattctgtttgtgggaaattctgccccagagagccataaatgctccataagtggcttctcatcagattcaaggcacagcctcaattcattctagacagccaatcagaggatggttagaggaaatctgtgactaagcaatgcatttagaaacttattcctggacgatgtcacattccctaaactgtgatttaaaattagataggggcagaacagatgaaaagaaactggagaaaaataatctcttcatcttgcagaggaagtgtcatgagatgagctgctggcggggatgtcaccctttctgctcatccaggcctcctggagagcctcctaagactaggccgatggccactatcctggagaaaagcacagagcattgtaatcctgttctctctaacaaaaaagctacgtcttgggtaaacctttgccggtgtacaacaggatacatgcccttttacaaaaggaggagctcattgttcaggaatctaaatcgggacatcctcactgaactttaaatcaattcaagaaaacctcaaagacagctatattttcagtctgttgcaagaactgcataaactcaaaacatgcatacggaacaaaacaaagccagctaattgattttatatacctaagcattcacctttaggagaattccgtgggattcttctctgccaaaccattggaactgtcccaagaaacacttcaaagaaaaccgaggaaatagatattggaatcccagtcgttcttccccattccttgtatgactaatcttaggggtaactacaaatgctgaaagatgaaataatataatggccttttagcagaatggagaggggcagcatataacaccttgcactgaatttagagaacagacatatttttttacttgagaaaagtagaaatagtattatcaaggcatgcagaatggctggagaaagaagaaatctgggaagcaaaattatggttgctggtgaaatttctaggagcacattatatgtgggtatgcttgcatggaatgaacaaaagagtcgtcttttgaaacctcttctggggatgcactgctatatttgttgagttctcaagtgcttatttttagacatgaagtatgttaccaaacacatattttccgtgtagtaatcagatgaccagtcaacaaagtcaatctatgttaactaaataaatagatgggataaaagtagagattgtattccataaccatgcccaagtagaaaaaggcattcaagctgtccagaatatgaccccaaccaactttcccatgccttaggcctactgccttcttcaaaagactcccggttccggttcaatccgctgcttgtgctgcccagacatgccctgtgctttggtacctgctggatttggtctgtttttccctttcctggaacacccatcttctccctgcttcccccatcagattttcctgagcctgaatttcacctccttgatgaagccctgtcaccatgaaaatcataccgtttttaaattcaaagaattctgagtgacctctagccaactcttcgtttaataacctttgagactgaagcctgagaaaataggccttgcttgaggctccatagcagtgagtggcagtgacaccttcctcttccgtccctctgcgggcctctgcactgacgtgtcttcatgttataccgcttgtgtgtctgtcttactttcttcatcacagtcccttctctccccacgaatgagctgcttatgtaggacaaggtctacccgaaatgtagaatcttgaaaacataggggaatgcctaacacatgttaattctctctagttgaaatgaggagagaaaaacaaatctttctctcaaattcaatctatattcacaggtaaaatcttcagaatggcattgatgatgggataggcatttcccaaataaaatttggtgttcttaaaagaggttgtatctaagagaattcagacatatagaaacaatttgtgtattttcataagctggaaagtccaataacatactgagatttacgtttttgtcactgactgttttaaacctgattattttaacaagcactttctaacttttgccactgtactgcctgacagtttttattgccagtcagctgattagctggagtgttcaagtcaaattaaaatgtgacacatttattgaacatataaataatgcacatgtattttattctacctatactctacaaaggattaaaaatgagaaaaacagtctttgagcttcaaggagcttgcgtttttatttattaattttttcaaagatgtgcttacaacatgggatagagcagaggagatagctcaaaaataacaattttaaaagagtaagaggactactggttattgccaataatacaggaaatggatatttgtggtctccgagtgaattattacagtataggggaaagggtgcaagttataaggtctgtcaaaacttgcagaagtttttgctctgccattcattagtagtggaatcttgggaaaactgcttcttgtctctaagccttggttttcatccacggcataggattaataatggtattttcctcaaggcatcaaggtgagggttgaatgaagtagagttggctctctttatcagcgagttccatgtccacagatttaaccaaccacagaaatacagcaataaaaataaccatataacaatataaatagcaaaaatataaaactacagcataacaactatctatgtagcatttacatttattaggtattataagtaatctagaagtgatttatatgagaggaagttcatagattaaatgcaagtgctatgccattttatataaggtatttgagcatctgctgattttggtgtctgttggggtcctggatccagtgctgcattgataccgagaaatgaccgtaatacatgcgaactacttagtaaagctcatagcaggaactcaatgaatgtaagctattattagtttcaggaaaagaacctgtagagaagaagaatcataggcaaagtatatgttttaggaacaaacagaaggtgagtaaccaagagggaaaaaaaggcagattggccagggccaaagccacaattgcgagatgcataaaagtaaagtgaaaggacggagagccaatgaatctaggctacacttgaagaagcaggtctgtttatgactacctggttttcccaacacctatttgggcaaaaaaagatacctcaggatatttttttctggggcgttggtcaacctagaataattctacctatgctcaataaaaactttttttgtacttaccatctaattctaccttcatctttggagacatggctttcagtgtgttttaaaatgagatatgaactattttttgtaacagaagaccttgagtagtaaaaggaagctcacctacttgttatacagtttacaagatttttacacacacgcataccggttaaactaatgcacacactgttagtaaaatgtatagctggcactattaaattcttcccaaagttagtttggttcacctccagtaatgataaaggacatcttggatgttagaagcaagatggagtcagatacttcagatttctcttactgtcataattttgcaaaggcagtttcatatctattacctgtgctaacttagggatatgtattaaccttctaggatctgtttcttaatgcataaaataagggagtagaagaagatggtctctgaaatccatttctgctctaatgttctagatttttattcctgggagtatacattttgtaacacttctcaaaattttttcacagacggttttatatcatagtctatcaattgtttcatttgttcattcaccaaatatacattaatacctcctatgtgaaagcatattcaaggagaatttgttgagcaccatctctgaattaggcactttgctacacacagaagataaaataatgtaaatcatcactatgtgtcttttgtaggattatttccacacccctcagactatattttaagcacttggaggacacactggttgtgtcaacctgagcacctaagatgtgcaatgtggatgtttgctcaatggaatcaaattgaatcccactttaattcttttgccctcattttaatatttttaatggtgagcagagacattgacaaaggagacagtagccatatttatgaagttttcttttctttcattagaagtatatgttgcagaagtatatgttgcagcagatcaatggctgaagtagtctagtcctactcgaaacattctaagatactctgaatctttctatatcttctggataccaaaccaccacttcttaagaaatcaataaaatgacctattgctttcttgaatgtcaattgtatttatgatatgttagaaactattggggagggggttgagaaaaatccaaggaagtatttattttggaggagagacagaacatatattcacaaaacaattcgaggaaattctttcaactgagcaagagttaaactacacaataatagggccagggagagtctatttactctccacgtagactgaattgacattttctgttgaatgtctgagggacacttcgaagtcaacatgtgcagaatggaactcaaacctggcctatgtctagtgtccctctcccagtgattggcccctccatgcacttagatccacaagccttaatcatcaccagtcatagacattgacttcactttctgtagccaatgatactgtctcagtcttctcaggctgccagaacaaaataccacaggctgagtgccttgaacaacagaaatttattttcttgtagccctgggggctgggatctgagatgaagttggcatcaaggttggcatctggtgagaactctctccttctcttgtagacagtgccatcttgctgtgtcttcacatggccttttctctgtgcttacacacataaagatcactgacatcattcctcttctcataaggacaccagttccgtcagattgaggccctaaccttatgaacccatttaactctcattacctcttcaaagaccctgtctcccaaaataatcaaagtggggattatggcttcaatgtatgaattttgggtgaacctaattcagtctataacaggtaccaagtaagataactccagcttcttacagccgcagtgttacagtggcttaatacaactctactgcttgttcctatattccagttgttggggatgtgggagggggcgaagagctaggttatatgcagttattcaggaataaaagttgatggaagtgctgccaccttcaaagcatgatgacagcaccaactttggtcacagatatctagcagacagaatgaacacaacggtaaggagtgagtgtaattaaaggctggttttttagtttggagggagctatttatttttgtttggtgaatagctagcttgtctgtcataccaaattcttttcaacattcttcaaaaatactggccaacatggtgaaaccccatctgtactaaaaatacaaaaattagccagatgtggtggtgcacctctaatctcagctactcaggaggctctggaaggagactcacttgaacccgggaggcgtaggttgcagtgagccgagatggcaccattgcactccagcctgggtgacagagcaagactctgtctcaaaaaacaaaaatacttctcaaatctacccacttcttttcaccttcactacccaacaatctagttcagaatatcattgtgaactagattgttcacactgaacggatttaccacaaaaacctaccaacttctttatccacatagatcttgtaattgattttattttagtaaaatatacataatataaaatttgctattttaaccattttaaagtgtacagttttgtggcattaattacatttaaaatattgtgcaagcatcaccactctatgtctccagaactttcccatcattccaacctcatttaatgcacttcttaaacaataagtttccattcattcctcccccactccttgtaacctgctcttgaccaagtccaattgcccctgcagccagaataatctcctaaaaagtctaatcatttaatcattgtacacacacaagcacacgcatacacacacacacacacacacacacacacacacacacacacacacaccgtgtttagaatttcaaatgtttccctatggtttcgagggaaagcatggaagctcctgcgatgactggcaccctctggagctctcaccatagctatctctttaacctgatctaaaaacacctcccctccaggttcggtactccagccagccaaaatggtccttcagagcttcacgttcctcaagctctgtcgcttcctcagcaaagccatctcacaacttcccaagtaggccgggcctgcccattatggagtctcatagcactccccatttctttcagaatatgtattgcattactacatatatcttcctaattctgtaatagaatctctcttcctattggacctcagatttcacaaaggcagagactgcactgtttatgttcactattttatttctagtaccaaacacagtgcctagtgtatggtaggcatttgatgaataaattatgaatgaacagctgaatgctagtggcatcagcaaaggttgaaatcagagttacacagaaaacggcttggaataaaggagcatgaaagcattggtaaaattggcctaaaacggccgggtgcggtggctcatgcctgtaatcccagcactttgggaggccgaggcagacggatcacgaggtcagagatcaagaccatcctggctaacatggtgaaaccccgtctctactgaaaataccaaaaaaaaaaaaaaaaaaattagccgggcgtggtggcgggcgcctgtagtcccagctactcgagaggctgaggcaggagaatggcatgaacccgggaggcggagcttgcagcgagcggagatctcgctactgcactccaatctgggtgacagagccagactccatgtcaaaaaaaaaaaaaaaaaattggcctaaaacaatgggaaaatattccctagtgaatgaaacagcataattaattaatttgctattttattattattcatttgacattaaatctatttagcatgtcaccttaaaaaactcagtgaaattttctcttaattttctctatggaaaaataagagattttcttaattttagagcatgcctttctttgaaggaaaggagaagaaaaatcaatactgttgaatagtaaccactgtgtaagcaatttcacatgagattatatttgatattgaggttctcttaaaagagtaactatgacatttctactgcatccttgaaagctttcacaaagaatgaatccaagtcagagccatatactaatgcattgaaactcacagacataaaacacaagactagaacttggtcattcaaaccctcagataagttgtttctttctcagtccaatatcccagttacacactcacatttcagctcttgagaaattggatggattggtaatattgatcaagcctagttaatatgttaaggaatttttctccaaactatcttactgctgtgtccctagaaaacagaccctgaggaagtgattaaatgccaatgccttatttttgtggtgaaatcacatggcagagagatggaaggctaaggggaatcaggaagggaaaaacaggaagcaacccaaggtgacgctttaccaacactggctacatagcaacaatgaacaggggagagaaacagctggtgacttggcaggtgtttctgctcagccatgcaggatgtctacaaagggaccctagagagagtgtatgccttggaatcattggttctcagaaagaacagatagagaatgcgttgacctggctctctctcatctcatgtcctgtcttcctttggtgtaagtttgcttcacagggagtgaacaccttggatgtctagattgccatccatggcccctgcagcaatcactagagaagccagatcccatgccctgaagaatcacatttcatctgaggttgggtgcagcagaggagccagagattttggaggctcagctggtcagcttcaaaaggtggaactgcaaggtcatgccagctacaatggcagaggtatctgagcaagcaaacaaaggtttgagagtcaaggaagccaacagaatctgaggacccatgtaggacacgtgtgacacacaaggcttttgaaggattggtgcatttaatgtggttagcttgtaaattctaacctcctctcatagctaccagatggctacaattttaaaaggctaataatactgtcttgctgaggatgcatcttaagtgaaacgttcaaatattgctgcagggagttggctcaactgtgttagaaaactgtctggtaatttctattaaatctgaacatgcatcactttatgcccccaaattcaacttctaggtattttcccaataaaaattagtagttgtacattcaaaggacatgaataaaaatgttcagagcaattttattcaaaatggctaaaagataaaaaccaaccagtgtttatcataagagaatgaacaaatagattatggaatctgtaaatggaaagctactcagcaattaaaaaatgaactattaaaacacacacagcatggaaggatatcacagatattatgttgagtgaaggaagctgcacacaaatgagtacctcctagatgaatccatttatatgaagctgaggagaggcacactagtgatgatgtttggggagggattaaatgggaaagggcgtgattagagcttctggaacaatgcaatgtgttatatgttgatctgcatagtgtttgtacaggtgattacacatatataagttctccttgctgtacatataagatctctgtccttttttgcatgtagctatgcctcagttacacacacacactccaaactgctctcttcctgaggttttatggagtaagtttgccatgaaaacatatggataagagcacaaaaacccatagcttttggatgtgtccactaaaatcttttgtgtaggagacatggaatacattttccctccatggaatttgtagacactacaagaaaagaactggtttccaattattgaaatagagattagccatcatctctttctacctttagagcccagacagctacaattaaaataattgattataaaagagagaacaaacatttaggccaaaataaggcaccaaatgaatcacacagactgctaaaaaatatttgctttctgttccaagaagaatgatgagaataataaaaaaaaaaagttgactcacaaagaaaacagaaggttgacaaagctttagtccggcagtaaagatcaaaattcaagtccgtcaagtgacaagagaaaaatctcagggagaataacaatgaatagaggggaaaggcatcctaaaaagaggagtcaaacaacaaagacaactgaagaaagggggcctcttacaaaagagcaaacatgaaaagaggagagagaagcgtggaaacctgtataaaggccactgaagaagccaagagcacaaaaaaaggacttgagatgagaaataaaaatggaaaagattaaaaggaagaggtgaaatggcagagagagagggactaaccaactgctcttggaaaaacatggctgtgctaggaaattgacgttttcacgccagtgggagtcgagcctgatgtgggtcaggaggcctcttcatctgttctgctggcttcagctggccagccctggaagtccagtccagccaggacctcagtggaggagaactctcaggaccaggagacaatggcagtgcttctcagatcccatggccctaggatggaaccatggggggctgctaagagagttccccatctctccaaggtaccacattgcgctttggaggctgtagtgcccttgtcttgtgttgatcctggttgcaagcatttatcatattgcactagtattggggaagcatctccatgcagtggacaggaaaagaatttggaatcagaaacctgggtttgatatttagttctctacttactgtacagcctcaggcaactcatcgtatctctttgaccctcaacttcctcaactctaaatggcggtcatttaaacgagataatgcggaagaaagaatttcatccaacagaaagtaccttataaattttagtaattttattatcagtttgggctatttggaggatgttggaagcctcaggtcatttgctaataaggtcaaaggggaaaaacacacacattctgaatggatgtcttgggttaatgtttgctccacaaacgaaaatgctggcatctgtttctgagcggtaaaacccctgaggcagagcacataaacccaagtttattaagaagtgtgactacctatcaaatatgaaacagccttggctctgagcttcacttcgcctggaaattttaaatggctccttcatcgcccacagttgcacctatctagtgtgttttgaagaactgggacgttaaaaacaacaacaaaaaaacagagctgattaatgactgcaaaagctgttttgggggaaaaaaaagagaaaagttgttgtcctattatatctctgaaaaaaatgagcattttattgcttctacaaattgctccctggaaagtacttccattttctaattgttcataaatttactgacaggtggttacacagtaggtataacatcgttattttcattttattatatacactgttttaacgagaaaatctggaagggctgggtatcatatatcatccgacatatcctgaaaatgtgtgggtgggcaggcatggcccaaggctgctacttcccctagcatgcctaggtctgatgcccctggcacagggtcaatttggacagctgtgactggttgaaatacattaagatgatgacagtaaaaatacattgcttttctatgcttactcttttgcttaaaaaataatattaaagaatagtctccactttcactgaaagaactgtcacaagttttcattactagaaacaagagaaatttgggggcttatacgtacactacacacttgatatttgatgaccattagtcgtgttggatggattgctcttttcaatttaacatatgttggtgctcccacttcagattcttgagtctgtgaagctgagagttgtttcagcactgctaagtgtatctgcaacatctaatgttttggtgagatcataataaggactcaataaatatttgcaatttagtgttccaactattcttcaacatttatttgtagggattcatatattgattaataaagctatcctctcatggaaataataaccttatggtttaaataaaggcaactgtaggcaaatgcattcagcaaacaggctcaagtgtttatgagaactgaagaggtagaacaagtttgtatagttggcttcccaccacacccttactgaaactgctcatatcactatcatggtatgataacaaggttatcattaacatccacatagctggctttgtttcctttcacatttctcaatagattttgaagccgttggccacttttttcttgtagaaatactcttttcttatttctgtgatatcacgcacctcatactctctgtatgcctctaccgactccttccattctcttccaggggtcccttgtcctctatgtaacctcagatcactgggctccaatgattacatcacagcccttctctgcttgctctacccactacaccatgttgatctcactgatccaagtttccagtcataactccactcgttctacccattcctccatgttggtctcattgatcatagtttctagtcgtaactccacagtctcttcagcagctaaatccttatcttccgggaggcacaaacatctcagttcctgcaggttacctcatgctttacgtgtccgaaacaaatcctcatactcactcctgctctttcttttcttttttctattatcaaacatgccacgttattagggttgctagatttagcaagcacagcaacaggacatccagttaaattggaatttcagatcagcatcaaatcattttttattcaaatttaactgggtatcctgtattttttctggcaactgtacccccagccagttgccaaaacctaaaacaaaagacccaacttcaacacttccctctctcttgttccccccaaaataatatgtttaaacctacttttctattattttgaatggatggaatacttttatttatgttcaaaatcaacattgttatacaaggtcctgtcacttcttacctggattctctcaagtgcctcctgtctgttcattgttttttgtttttttctcctgcctcacctccctccactctgcaccctacaacaccatcttgctgatttttgcagatcaggttaagttacatgaacagggaccagaaaaggagcaccaatgtagtaggtttcttcagagaggggtgttgtgaagaggtgtatattttagaagcagtccatgatctgagtggggcttgttgactcctgtcacctcagatgtttcttcctccctctgtcagcactaatatccgccatgttatacagcctctaagtcaccaccataatctccagcatctctgagccgaggcagttacttatgcctctgccagaaacagctctgttcatcccctcagaatgcagattagagggcatctcttcaggaaagaagagattcacatttcctaaatgtgaaactgaaataaggtgctttcctatgtgctaacacgtcacacacatacaccaatgttgtaggagttgtgtgtctgcttgtatttctgtctccaaaaccagaccatgagctgtttgaaaacagacatgatgtctcttatttctgcatacccagcatctagcatggtgtctggcatcagtgacctctcaacaggtatatgtgatgtgaggaagaacagccatacatgcaaatatctttcaaattcctaattgtaatgggtcctgggagtcctgactgatgctagccattttgaaatgcctctaatagaactgttggaactataggctgtcttctccatgcatattggccacatctctattgtagcacttgttatattgtttgaatcatatgtttaaatacatgtctccatttattttttcaagaaacattcattgaactcctcctacaaggtaggcaccaggccatatgtagtccctttcctcaaggagcttgcagcatttggtataaataaaacaagtaaggacgttaatagataaagcatctcaggcactatactagatgcatgaacagggtaaaatggggcttagaggaggaaatggtcactccttctggggcatggctggaacattttacagaaggactgacactaaacagattctgaaagatgatcgggagtaccacctgacaagggagtacaggtgttgcaggcatggacctgagcaactctcagcctattcaaggcactccaaggagctgtagaggctggggcatagggggaagataaagctggacaaaaaagaaaaagtaagatactatgaggaataaatgcaaagatagggaatttggaaaccacagaaggattttaagttgggaaagaaataagattaatatgactagattttgatgttaaaaatatatgtatgttatgaattcagataaggtgtatagaagatagggaaaaggcttataaaaatgaaaacttagcttatctatatgaatgaatttttctccagtaagggcctcgtgacatggctcaaagcaatctttgtaggagtggctttaggattagaacaaactgcttcattgttatttggtatgagcctttaaaaaaaaaaaacatgcatttactaatcaagctgccctgagttttggattatacactttcaaatttgttcttttctgaaaatatctctgctgtacagaacggttttaaagggaagtttctctctctctctctctctctctctctctctctctttctgtgtgtctatatatatagacacacacatacatatacatatatgttttatatatataaaacatatataaagctttatatatatagctttaaaaaatcatttttcctgatatattcaaatgatgaaacacatcacacctgccaacactaaaaagctataaatagagaatgaagtataaatctagaaagataaataagcagatccattctatatctattgcaattaggagagtattttagtagcaaacgagagggaaatgattactgaattgcttacaaaacttaggaagaggagatataagatatataatggccagaaaaactatgtatatattgaaagaatcattatgaaagtgatatgaattatctaataactccaacatcacaaatgaatttattacattcactaacctgtaggtgaaatgtcaaacatcctctttaaaatagaaaaaagaacagttcaacccaaatattgcagccatctttacatcaggaatattgagggtgggtgttttagccataattcctaatgttaagtattaatgctttagatatattgagcattttctatatatagcacaatctatcaggatatagagatgcaatgacatgtaggtatggcctctgcacttgcacagtttacactatggtggtggagacagagaagtaaattattatgatcaaatgctgagatgcagttgtgttctaacaaaacatcatgaatttgtggaggaggaagtgaactgtctggagtggtcatggagtctttaatgagctgagtttcagatgatcgacatgtagatgatttcagctagataagtcatgaagcaacattctctgtggagagaacagcatgcaaaatggcaatagtgattaagttctgtactagcctagtagtaagtgaaaataacagatttgccctcagggagcatccaagttaaagggaaagctgatgcatttacaatagacaataataaagcaaattcaatcgaagctcatttccataactttgggaagaagagtttggtaagactaaggtagtgttttgaagtggaggtggagcttgaactgggcctcgtataatgtgtaatatttggaaaggtgatagtagtgaagaaaaagggaatgtagagaaagcatatttaaatctaggctgaaatttttttgatttgacatgaaataaaaaaataaggggatatttacagatttgcaagcaggtaagaaaaagcagtgtttaaagattagactgccctaggtatgcagaattgctgagagaggacagaagacaggagccaggaaggtgagatgggagggcatggtgttaccttggcgtaagtaatgaggggatggaagagagccatgaacagagaaggagagagccagagccacacggctcacgttaccaagggaaaaatgagtgaattgaagaaggtttggataaagaggttagaagaaaagtataattgtaatgtttggaaactgtatgaaaaaagcatttttcaaattttactggcaacaaaaaaaatttgagaattgtttctgttgacatgtgtgtgattcctgtctttattttctttattctgatgctttggcatctggggtcttgctgaccttggaagcactacccctcccaggattagtcaattttcagaaataggaaaggactcacctgtaagtgaattaaccttctatatgcaaaggaaccaatctagaggccacagcttcaatcatctccttcctcaggctctcccactctgggccactatcgcctgccctgattaccctagggccaggtaccagataattacacccttacaccacctgtgtccccagccaaatctcatcttgaattgtagttctcataatccccacgtgtcgtgggagggacccagtgggaggtaattgaatgagggggggcagttaccctcatgctgttctcatgatagtgagtgacttgtcacgagatctgctggttttataagcagcttttccgtctttgcttggcacttcttgctgctgccatgtgaagaaggatgtgtttacttccccttccgccacaattgttaagtttcctgaagccttcccaaccatgctgaattaaacctctttcctttataaattacccagtcttgggtgtgtctttattagcaggatgagaatggattactacacaccttcactttcaccccagagcccactgaaattattcaggccaacccatcctaagcctgcttgccctgccctgctctttccttcccatggaaagcacagtaacactttcctctcacttcttctgcttcccagcccaacctggtgcttccctgcttggtcctgcgtcatacgctgtgcccctgtttccaagaatctgtgaatataatgaacttcttcctcgtgacagtcatctccatgtctgcatgtcctaccatatctaattaaagcaaatcccaggtgtctgattaaaacaacttactgagtacagtagataatgcttggcttgcttatgcagtctagctgatcagaagataaatgagaattatatgcaacaaaattattgtctttagtttctacttggaccacacagacatgaccttagctatgatcggctaatttacatataatcttcagtgaggttttatctggattaatgatgtcctcattgcatatgaaaataggggtaactcaagaaactttcagaagttagtaccaaaatactgttacataaccactgtcttttattatgccaataatatcctcttttaaaatgtcagaaacatctaaaaatgattttttgctttattttgtttttttcctacttggccccaggtgcagcgttgagttcatcatattctttagtttatgatactctgtcatctttggtttgtggaaggttgttctacttaaaaccaagcagataaagaaaactggaaaacatattaactagaaacatgtcaagcagataattaacattattctgtaagttggccataataatggatataaagaaaataaaaggcactaataagttaaaaagaaacaagaatagatattttgaaatctagatgtaaaaattgttaacctaagtatgttcataaaataatctaatccacttagtatgaacgaattgtacattaaaaggtcatttttcaatgactatactggcgtttaaaaaaattaaaacaatagtgagaaagttgtggttaacaagggcactgttaacaattgttggtgaggtatacgttattttacaaagcaatccacaatatgtatctcagccctttaaaatgttcttatcccttaaggcagtgattatacaccaattaattcttactaaagaataacaaacatcaaatgtcaatgtatgaagatgttcatcacactgttatttatgacaataaggaaaagctatttggagtagtgaagaaatggtaggactgggcaccgtggctcacacctgtaatcccagcactttgggaggctgaggtggggcggtcacgaggtcaagagattgagaccatcctggccaatatggtgaaactctgtctctactaaaaatacaaaaattagctgggcgtggtggcacgtgcctgtaaccccattaaaactgtacttcaaagaacatttggtaatatgagagaatgtatttgttaaattgataagttgaaagaataggacacaatatgtgtgtgtgtgtgtgtgtgtgtgtcttctcatagttgagagcagagagcatataccactacatactagaataattaatagtaaaaagactggcaacaccaagtgttggtgatgatgcagagcaatcgtgattctcatacattgcaagtgggagtataaaaatgtacaatgattgtaaaaatgcttgatagtttcttataaacttcaccatctatctctaccatgattcggcaattatactccttagtataagaaataggaacgatgtccacaaaaagattggcacaacaacatttataacagattcattcatttttacaaaaacctggaaacaactcaaatatacattccaactggggaatggataaacaaattgtaatatattcatataataaaatactactcagcaaatacataaaaacaaatgaactatgtctacataaaagacagaagaaaaattcagaagcatgataaatgaaagaagctaaatgcaatagatatatactgtataaaatcatacataagaaactcaaaattaggcaaaacaaatttatggtgatagatatcaaaagagtacattttctcaaacctagggagatacgtaatatttccttaagttctctcataattttcctccagtggctactactgaaggaaagttatgagagaactttttaaaaaaaattctttgtttttgaaggcagttattgagtatataaacttttcaaactcatcaaattgaacacttaagatctgtagttgcaaattttatctcagtaaaataataaatacttaaatgttaaaagaaaaaaataaccatatatacatatatatatatatatatatatatctcctaggtgtaaatatacataaaagatatatataatctccctaggttttaggaaatatatatatacatacatatgtatatatatatttctttatttttttgagacggagtctggctctgtcccccaggctggagtgcagtggcaagatctcggctcactgcaagctccgcctcccgggttcacgccattcgcctgcctcagcctcccgagtagctgggactacaggcgcccgccaccacgcccggctaattttttttttttatttttagtagagacatatatttttaaaccacgacaagaaacctaaaaactagtttaacaagaaaaatatattcacatttaactctgtttacgtttttgaaaacttaccctatgatcaaaatattattaaaaagtcaatagattaacaatattaggaaatagatttaaaagcacaagacaggtagtgtctacaaaatccttcagcatggcaagacgtatcatggagtatttattaagatcacaagtcaaatcaataaattctttgtgtgtgtgaatgtgtgttaacatccaggacatctgtgagaccctaaggacctattcacagaaggccactgaattataagttttgtccaggttttcagctgggtaacgaaacacgtagctggaaatgaaaatgtggcagccatgctgatcagggctgggctgttaaaatggtttctgcctgaaagagtccctcctgtaaacatccctaggatagggaatgcagatccagcttaaaaaaaaaaaaaaagaaagaatgagaacatgattgtgccacatggagatttgggcaggatcttgttaggcccctgagggtgcctcaggcatctttattcaaacacattttttttttttttttttttttttggagggagcaaggaggagatcacacagttgtggaactgtcgtcaaagcaagcagctgacatttaaataatattatgatttaaaaggttcctttgcattcgttccttaactcattacaccttcacaactctgtgacacgagaagaggaggtgacactatttccatgtgaaaaatgagaacactgatattcagaaagatgaactgatttttgtaaggtcagatatcttttaagtaatggagcagggacttcaagtgatgtctgtctctctccagtggctctatgattctcaggatatcatcctatctccacgcaacacaatgtcgccgcagaggagtcgcttcctgagtggttccatgatagccagcccggtatatctactccttttggtctttttctgcttccctatcttcagcaaggcgaggtaatcactctctctttggtatgtgagatatgtatctattctgtcatatccgcctttcagttgtcacatagccaaactatgcaaatgtggccatctccacatctctgcgttcagcacggctgctgctccactctggactccttccaactgttcagatgggcagggaggagtttcatcatcagagatgataaagaaacatgactattcagcctttctcgtacatctaccgaatacctaactaatgatgttctcaccatattgaaaaaaaaaaaaaaaaccatccaggatgacgaatttattccctgagtgcctcatgacaagtgagtcagctctcagcaaccagaattacaagtggactgagctgggtgacggtggagcatgaggaagtgcagtctgtcctgcctataaaggtggtcctaggctaatcgaaaatctgcaccaacaacacagcaaagtgtcttctgctgccagtaacagagcacccaactgttggtgtttgagggggacaatcggtagctctctctctttttttctgagacagagtctcgctctgtcgcccaagctggagttcagtggtgtgatctcggctcactgcaacctctacctcctgggttcaagtgattctcctgcctcagcctcccgagtagctgggactacaggtgctggtagctctcttttccctgcctaagttcagaacaacttgagagacaaacagggagaaaatagatggaaataaaaatagcccttcatttctgatagaaattaaaagccgggaatgtggtttatatctttacgtaagcaaatgggcatcccaatcctgagcctcaggattcgaccccactcccccagtcacaggaagtgcgaggaggccccaggccctgggtctgagcctggcctcttacgctgcatgacacaggacatctgttggaaggtcagtttctaagacaaaataaagagctgatacctcctgatttatccttccacaaacctgatcagattgagccatctcttctccctggtggtaaggggtgtgtatgggtgtggggtggggacagcaggagggaaagtaagggagggtgccaggaaaggcacagagtgttacttggtagagtttcttttgggtaaaagaggcatcaataatgtttccttccaacaccaactaaaaagggtttcaacaagaaagacgtttattacctcatgtaagaaatcgggggtgggaggctgggggtggaagtcagggctacagtgagagcctcaaggcccaggttcttcctgtctttcttctccagtgtgtggcttggaccatcacagtcaaaagatgggggtagcagttgcaggcaagcatacagacacagcagtatttagcagaagcaaaaagggaaaggggatttttcttgcatgtcaccttttgttaaggaaggaaagctgctccagatagctgccctcggacttccccctggatcctactaattaagatttgatggcctggctatgcccagcctggcttccagggtgtctcagaaaatgagtttatggtattcgagcttctttagaggaaagtggcttctctcataaaggaagcaggttgttagtgttatggatggtggaaatagctattgagtatgtaagcaacaatgtctgccatgattacacctaaaatttccacaaggaacatctgcacatgtggaaaatttctgcaggttggactacatatgacagtccctaataactgaatatacttttgagttctcattcccaatccaaaataaaataaggcaaagggggactgaaatgtaaatattctatcctgcctgagcccatgcctcagtagttacatgcttcaagggaagggtcatacagtggacagctcaacagatgattagatctgcaccttggggattatgtagtgctgcttcctcatctctaaagatggggtgtcctcgcaggaagagatgaggaagcaggaagagactttagagatgagaaatcagcactttcttaaaatttttaacattttttctgtccactccaccctactgcccttggaagccaaaagaaggttgtaaggcattcatgaccataagttatcacttagaatcaagtggcaggaaattgaacttcagtagatcccagagtgaagtcacattttttccactatcacccaacttgttagggaggattaactgggccgatacactcaggactagaacacaagattctaactcagccttgcatgcgagataagaatataatgccctcttactatgttgtaagaccagctgcagaggagctcatgctccaagaggaagattttcttggagattttagtagttttaagatttgtgcaattgtgtttggaaatccaatatcatttttaactgtgagacggtaacactgcccatgattattacagtgtggagtagttcttctggaacaacttttgggtatagatttatgatggccaattatttagaggtctttctccccttaaaaatctgcaaaaattgtggaaatctaaatttccctgtctaaaactatggagtatgcttacttttaaaatataatacaatcccccccattgcaaaataaaaattggtatatttttaagaagtcctaaagaacacttaaattatttccaattcgattcctcccattccttgttcttgaaagaaaacaataacaaaaacaaaaactttagtcaaatgttgttaaggctcaggaatgatcgatggcttatatgaaaggtcctcatcaaagcatatgatttagaaaagaaggagactcatttttttccccagtctaccttcccatgttttttcctttctgaaatggagttttattcaaggaaaaaaaaaaaaaaagccagacttcatgatatatgtcttgcctaccagagaaatttgaccaaaaaaaaatttgttgaccaaactctagctgacagacatacttaatctattatctcgataaaatcaacttcaaggaagatctcagattgtgctgtcatcaaaattgattttatcaaacaagataatctttgctgtcaacaagcagcactttcttaaaactcttaagatttcttctattcactccaccccactgcccttggaagacaaaagacgtttgcaaggtaatcatgatcataagtcatcacttagaatctccccaaacagaaccaagcggcaggaggttgaacttcaggaagcagctttcaggctacattcatgtttaaggaaaagaaagctgaaatagtaaatttagatagctacatgttgaaaatactcccccccggatacaagatgtccattgtttgaagcaataaagtgcaaatgaaacccgtctttacatgcacaattgggcatgtgcttccataaatgcctgattgtgtatgcaaatgagtgttttgcgcacccagttacctgcttgctgtattcagatttttagggtcgatgtaagtgcttttattatttttttaataaaattgttctaaattatctgtggatgaatgatgctttagaaaattgttatttccctaaaatccagatttaaacaagcgcctctgaaactttgcaatgaatagttatgtattagtaaagtcacgtgcagaattcaagcaattatctgggtgcttcaaggtaaacataccactgtgcatacatttgtcacataattctgttattttaggtagaagaaagggcctagttcatccagctcatgtagctttgcactttatttaactaattcagtcaaaacacagggcctagaatataaggcagtttcagcctcctcttggaatacatgctggcatagggaagtggatccattgcaccacagtgatcatatgtccaagcgaataagccttccatataatgcctcctgacttgcatttattctggcttttctcggaaaagaaatagcgaatgtgaggatacactaaattaaggctacagaactgtgagtggagaggaaaaatctctgaataattttcttgacacttcattcaaccccttcaggacctatggtgataaagcactgaagatttattttaatgtgtaaaaaccctgctctgttcccctgggagatgctaaagaagacactgggaggctcggggatagtttatatttatcaggtaaagtactgtctgctcactaataagcttcataaatatttttcccttctcttgaacttaaagaagatccagatttgcaatctaaaaaaagagaaaaaaagaaacaaatttcaaaggttctaatacgttagtagaaaaatgtatctgcattactagctgctttgttggcgagactgtttgaatatcatttatgtaatcctgacttcattgacacgccatcaactagccaagcatttaatcaccaagatagatgactaggtcaggcgcatactacctatttatatattttttacttctgtagttgttaaacctagaaaaggaattagatttttttttttttaactgaatttgaagctgaatttttctggcgactctttctgggtgaaaatatcagtccacaagatgttacacaacagtcccttactgatgatttctccctatttccaccgtttttttccaatcctggcagatcggaccttcttaagcttcatcactgagaccagaccacccccacattttaagcctggttctcccaaagtaggggacagacctggaatcgtacgctagcctttctctgagcctgctgttgaggctgttgaaggcttggaaacctccatctttcagtggccacagttactactcttgagccacagcttcaaaataatttagcccatagtctaagtttcccttgttcagcaggtttgtgcccctgacatttgctgccagctatctttgatgctgaattttatttttttggcttcctagtacttctagactggcatcctagactttggtctttgcttggacttttgattatgtatctaagttctactttgaatattaaagttcttaaatattagtttatatatttacttcctcctattccctcaggcattaattaagtgactaatatgttccaggcaggtattagaacctggcagtgctcaggacacatagacattgtccatatggaactttcttgtgtctagattcattcacactgattgatcacgtgcctgtgttcagagccaggctcttctgggacccagaggtcacctgctcttccatgtcctgctcaggatagtctctgcctttgggagacttctaatctgcattggaagattgggaaagctttccttattggagcagccacttctgtcctacccacctcatgggcaatgaagttggagaaggacttaggaactaatatcatattctaaagggaagagtggcatggaaaacatgaacttctgcatttgttttctttaagaggcactacgtggagaagcatagtattagatgtcaactgcaatcacttttcttcagaaagctaaagagcatatatacagactatatatatatatatatatatatacagagagagagagagcatatatacagactatatatatatatgatgtatacatatccagcttgatgtaattaatatattaatatagatcttgtaactctggtgttcagacccctgtatttaatagctataatagaaatcactatagctggtaacagaaaaaaagtcatattctgtggctttatgtcaagagagaattatatttagaatttagtttatagtttaaccttaaagcaaggatgacaatagcctttcccaaaactaaaccacacttgtaaaactaatcaacgtccacaaagttaggattattacaggggcttgaattctgctaagatatgggtgtggttaaaagataaccagctgttgttttggaggtcacaagatatgtaacttccccaattactcttacacataacatcactattgtggaacctctgattggccttttgagatgtcttttaagacttttaaattgctgactccatccagatctgctgcttgtgattcaacaggccctgtgaccccacccaaaggcagactcagtgcatgaggactgttttccatacccctatgatttcattcccaaccaaccaaccaacactcccattccctagcctcctgcccaccaaactatcctttaaaacccctaacctctaagcctttaggaagactgatttgagtaatatctccagttctttgctgtggccagcctcgcgtcaattaaactctttctctactgcattgtcatagtctcagtgaactggttttttctgcgcagcgggtaggaagaatttgttgggtgactacagatactggagcagttttctagatcttttgactcaccgtactgctttcttgtagccacgtgatgattattttcttcaaagagagctctacacccttgcattcaaaagatgttggcaacatgtcattacctatggacctaccttgattagaaaaatcaaaactggtcaggacccagtacagcttttaacacgtgaggaaagagcaggcgggtggtctgaaagctcctttcagcagagagatgtgcagaatttactaaatgagagaagcttaggtgcctagaaaacaggtttactgagaagaaagttccggcagcttgccagaggcatgctctcaaaatgtgagaggcagcatctcaactcttcacctaactatgtgcaaggtgacacttggggacatgtgagcaggacaaggcaggagccctgctggatggttgtagatttaagctagccccaacccctgggtccatcactcattcccataaatcgcacttatgcttctccctggaatagcaatcattgcagcccctcccacctccttgtgttctatggaacctaaagttcctgaatccgaacacaatcctttcactgttaagactggcactttacataatcctcatgtttgcaggccgactaaatgtaaatatatgcaaatatactggcaagttggtctggccctcaggccttccaaagagacctttcctgctgcaaaagttgagcattgcctgcttagagggagaaggattaaggagctggtaaaagaagagaggggacaacagataactttagaaagtaatatagtggggaaagaagatgtaagcataaccttcctataaataagcaagtcacagctagaaagcaaagctctgctaaggtagcactgggatggctgtcatcgacagtagctaggcctggggagcatttactcactagaggcagaaaatcactgcaaggcaatagtttctgaggcaaatgtgagcatctcctaaattgcatgaggcccagaaattgttttccccttcctaacgttagagaagtctataaaacttctcttgctacagccacaataggtactttgttgctgatgtttcacctagaaacctcagaagaacctgctcaccctggcagagttgccctgccagcattccacagacttccacagcaagaaatgggaggagaaagagcgaggcaggatgcatatcccggagcctgagcaaacccacaacaatgagcacatcatctctaacgaaaggcaatgagcagtgtgggtgggactgcaaacatcagtgcgtggcttggtaggatggaagcaaaaattaggaaccccgggataagcacaagaggagagtcttcacatctcctaaatcaagaatttacttagagccaagggagaaaggattggtcattagcatcagccacacattgcagttacccacgcctgtaaaatatgggagttgtagtttatttgttcacccacacatatgcctgaatcaatttgtttgagttctctccaaccaaatattgtcatttcttttatcatgaaatacttattgattactcattacatgccagacgcattcaataagcatttttgagcgtctaatctatgtgagttctgtgccttagggataaacatttctgttcatatagagggaaagactttgttcccatcctcagagtggatacattttggtggtgaagacagtgtaatgtgtaacgcagtagttacggtgtggtgtgatagagccacacccaggagtttggcaagtgggaaagcctgagctcatatgacaccttcaggtatttagaagagagagccctgaaccaagcaggcagaagtagggcgctgcagggtgcactaaagggcagggagagggtggggatcgccccaggcctgccatgacatgaccatcagggcacactgcacctcctgggaaggccctgagtaggacaacttctgcctggcataagcattgtgtgttgtggaccttctcaggagaaggcaagctgtccattaagggattgttccagtatcctctggtctctccctctaagcaggtggcatgtctacacaccaggggcctacacctgcaactctaggcagcaggcatcacctggacaggatctggtggagaagctgggtgaggcctctatctcagaggcactaaggctcaccttactcaggaaactgggggcccctcatgacggtaaagtggctttgtatttgacatgccaccacatcctgaacatatatgttccttaaggacgtcaatgctggttagaatctgttccagttcagcttgaggaaaggcactgagaggcccttccacgcacacctccacctcctctccttgcccagagctgccactttcacctcttaaggcaggtgcaagagatcccaggtcaggcctgtcctgtttgagatgctcccagcacctgcctggcactttttcaaagtgagtttcctttgaacattgcctggacacctgctgattgcccctggtctctctcagagctatccttgggcgtctttttaatggcctggccttaattgcattttcctgtatgcactgtggcagtcagcatgcagtttaataaaacattttcaaaccactgggcccattcttcccttcccacctacatcttatgcagtacaagattttaagccttattttgaaggtgattgatttggtgtattttccacttgctttcctgctgtggggacattttgcctctatgtgtgataaatttttttaaaggaactttgattttcctgtcccctcactttccaccctgctgttgcagaaccaaggactgggaagctttactcctcaagtagctattttgccttctccaattctgtgattagttgttggtgctttggattagccgtggccagtgctcaggggttgtcattcagggctcacatcggcagggtgtttgaaaggaggtgatggagatgtgtgtaccacagctaccgacggtttttcttttgaaactagagaataggccgatatttaattgtatattgttttgtcttattctggatgtgattacagataagggaaattcattaccaatgaagagattccattgggtatgcagtagtggcccctgaaagacacagacttggggaggtctctacattttctatttcctggcataagtaatatcgatgctgggatggaaggctcttaaggaaagcaaaacctatgatgaaagctttgatgatgtcttgctgatattatttctcttttgtttcaaagttatctgcttcatctcttcattctctctcaatgagtacaattgtgtgtgtgtgtttttcagaagtacatcttgaacatgagattataaaattatgacaacaatatcaaaactagttataagaagaatattttaaaatagcaagaatgttataagatattgagaacagaggtatcacacataaacacacacacatgttcacatgtattaaaaaggaggcacagttattccattgttatccacaaaatctaacataatttatcaaaacttatgatgccaatgcttttatgtgataaaatcatattaggataagtgaagggacagttctaaaagttgctgaaccaccctggcataatatttgtcatgcaatctcagaagcattttcaggaattaacctagcagtggaaaacaaataattttaataaactatagagggttgcaccttaatgcccaacctcatgaagaaggtggggcatgctttctttcccacagttgacagatgaagattctgaaacatagcaaggttgagtaaatcatttcaggtcacagagcaagtggtcaaaccaggagtgaaattttacataccttcctcctagaagcagctcagtaattgagactcttttccatatataggaattaaggctttagccaacattagtattgccttttctgttgaatatacctcaaaattagagcacttggaaaatgcaagcccaaccctcagtggccagcaatgtgattagttctcagtggtggtgtggaaaggaaggagggtggcatagggtgagaggcagacacctggcctgctcctgctgtgccccacgtgggaatattttaaaaagttcattcctaccctgtctctactaaaaatacaaaacagccaggcatggtggcacgagcctgtaatcccagcttctcgggaagctgaggcatgagaatcacttgaatgcaggaggcagaggttgcggtgagccgagacaatgccgctgcactccagcctgggtgacagcgtgagactccatctctaaaaaagaaaagctggctcctgctcttgcctcttgctgaaggagctcaggcagagcggtcggagagcagagaccctccctggggagtgtgccatttgcccagagaaccgcagggtgtcctggaacaaggtgcagattgggcttgcaccgggagggctgcatgcagagcctcagggaggctggctctgctctttgattttcccacccccaaccagggaggcgccctcagaacaccaagccacgggcgaggctcctctgtctcttccttctttctcttgactctcgaccttcctctgcttcctttattttcattcacatcctccatttgtacatctgtggctctttgcaggcatcttcaagttcttcttccatctctttcccttatcaccttttactttcccaaatctcccaggcaggagccccactcctccagccctccacttaccagggctaactcagactcttttattaaggggaacatccagtgtcaaactctcccatgcctctctcattcaacaagctcagtttggtctgcgttagagagccatgtgcctagaagtgtgtgtgttttgctaattgtaaatcacatatgaaatctacatcctgaatcaaaaaattgactgcaaactttgtgtctgaaagagaccaaactttttgtcctcaagcaacctgtaccttggaaatgacaaacactcctcgtggtcgtctgatcccagatcattgcggagtttttagaaaacactctaagttctatttaaatttattgcttggcatttctgggacacagaataatctcttctgccaacctataaattcatttaaaatctgtgctttcccctgaaaaatcataataaccaaaagaaccaataacaatgctataattaattattatttctattaaaagatagggcttattttttttcctaccctgtctctactaaaaatacaaaaatagctgggtgtggtggcaggcaccaccacgatttaggtgacattctaggagcagtatttctacagctctgttaatcacccttcatctgtcaatcagagggaactccttctctgcttttaactaacaaaaacccagtaataaaactcggactcccaggggacgcatggctcgcttacctgcggattttaggttacccggggagctgttatgttgtgtctgagggggaaataatctatctgaacagaaattaagaaaaaataagaaagaaaaaaaattaaaagaaagaagaattgaaagagagggtacaaatatctattacaacgatatcatcttctaaagctgtttatgataaaaagaggatttggtagcttgtatctcagctatattaaattaaatccaagatccctttcccagacacacacaggcctgaaaacatcaatcctgtcacgacaaactagcccctgggaaaaggaatcctcctggcagtgtgccaccgacccttataaactgttaaccgtggtaatgaaccaatccaagagacatattaataatgacatgaagagacacatttattgttgattgttgggatggtggcagatttattgccagcttgccaggagggagggcttggcccagcaatggtacaattaaaaacaaattgaatacagggacaaagaatcaataatctaacagagcaacttttagtttgcaaaatacaaatataaattaattgacctgaacacagttgctaactggtcattaatgtctgcttactggccaatcggagcacataatccatcccattaaattgattgcagcaggctgggtccctgcacttccagctctgcctgccagggcaaccatcagggcaccttgtttaggggtgatttttgacaccgctaaagcaaagtgactgtgttagaaattttccccagaagccctaaattaaggaattctttttaaggtttcactaagaacttctttattcaacaggcatgttttcaatgctacagtgtacagtgatctgtcccaagggaaaggacttgaagggaataaatccatgctggacgtggcttttcatgatgtggctaccaatatctcccccactaagctgccctttgagatgcttatttattcctaagaataactgacattttccctcaatctttcctaaaatcttaaaagcatatttaagacattttgctattatttttatggattaataaccttttatatgaatttgtgaaagagagacttctatggtcatgccaattcagattgctatccctaagctgtgcctctgtgaaaaattatggagccacctcctctggcttgtcttcaaggaaattacagtctaggagagcaagagagttacatccaccaataactgaaatttgaaacaaaaagctacaggtatcacaaggaagtacaggtaaagtggcagctggaatttttttaaaaagccctagcaactctaaaattgtgcaatatgatagctactggtcatgtgtgtctatttcaaattaaattaattaaaattaaataaaactaaagacttggcttttcagtcacactagtcacaactgaagttctcaacagtcacttgtggctaatggctaccacgttgaagagtgtaaatacagagcatttccgtcatcgcggaaaggtctattggacagtactgctttctgtaggatttggatatccagggagaagaacattaaaggcagatgaattctatgagaaacgaagaagaatgcaggatgctgggcagcggggattacacaaggacaaacttgactaggttgtgtgtaggatgtaaatgtggagaaataagaaataagagtggaaagggtgggaggggggtgagggataaaagactacaaattgggctcagtatatactgctcaggtgatgggtgcaccaaaatctcacagctcaccaccaaacaaattactcatgtaaccaaacaccacctgttctcacaactcaccactaaacaacttactcatgtaaccaaataccacctgtgccccaaaagcctatggaaacaaaaatttaaaaagaaagaaacattcctcctaccaaaaagtaaaaaagaaataaagaagtaagaatagaaaagacggtttggccctggattgctcagcacttggaaagacaatctaagagcttttgacttgacttcattgtcaacagggatccattaaaatacaagtggggtaagtgacatgatcagtatctgcatcagaaatacttagacaacactgttaaaatgaattatagggcgggagagatgaggattaggtatcaattaggatgtgacaggcaaaagtcagtagagagtaagattctgcactttgaaggtagtggttgtgggaacggaaagggagagaatgacgttattggacatgacatttgctttgatagagaagcaaaagagaaaaagagtcaaagctgaagccaaggttttatacacaatggtgtttccatgaatagaaatgcgaattacgagaagaggaacaggttttggagaaaagaagataagttgagagtggaacatgttaagattcctaagggatacccaagttgaggagctaagaaaataatcaaacattggagaatggaattaggaaagaactaaaaactggaaatttagatttaggagccaatgatatagagctgatattaactccaagaaaaaaagttataattactaagacaagatcaacaaaacaagagagaaaaaagtttaaggacagaccctgactccacagagattagactacaatgccttaagcagaggcaacctgacctgacacagaaaggatgtgtattgtaaatgacctggcgtggcagtctgacctacttatttaaaagctatggaattgaaaggaagttaagctagaagctgagtggagaattgaaaggaagttaagctagaagctgagtggagaattccactgtcaacggaagtgagtttaagatacaaccttgtacttatcagcagggcccttagcttctctgagccttagttttctcattcaaaaaaatgggaacatgaatcccaccctctggggttaattggaaaatagaatctgataatgtttataagatgaccgccaccccacttagttaactcttgaataatataagggctgggggtaatgacccccacacagttgaaaatctgcaaataactttgactccctccaaatttaactactaagagcctaatgttgaccagaagccttactgataatatgaaacagttgattaatgtatattttgtatttatattatatactgtattcatataataaagtaaattggagtaaagaaaatgagactaagtaaataataaggaagagaaaatatatttactgttcattaagtgcaagtggatcgtcataaaggtcttcatcattattgtcttaatgttgagtaggctgaggaggaggaggaagaggaggggtaggtcttgcggtctcaggagtggcagggatggaagaaaattcacatataagtggaactgcatggttcagactcatatggttcaagggtcaaccgtactcagcagatgataaccattgtttataattactgaaaaagattattgactgttttcctggtgattattttgcttcacttctattgctcttcaatttctatgcctatagaggagaaatttagtgaacgaagagtaaaagacttcttgagaagccagaataagaatagggacaacagttactttcgtcaaggcactatgtttgagggtaatacttgttaactaggagctcaaaaccaggttcggaaatgcaagtgagactctccaaatctgtgtacacctgctatgtgtagaaagacatcactattctgaattcacagtttacttggatgctaaacagtgactgactaatcttgcgggtggtgaggcttgaaaccttatgtaagatcctcactatatgagggtcatggtggacattaatctatcaggagagtttatgaacatttactaatttgtccttcttctgaggtgtgattgctcccctgctcacagcagcaggaacgtgtgggaaaagacctatttactggaggtattggcagacaggtctcttcggaaataagctgagatcaccatgcaaattcagcagaacataacaggcatttcattttccttccatctccacatcagtgatgattttgagaacaggcattacgactgttccgtttatttaattctattgcaaataaggcagatgacagccccaggccctgacacttctctctgtcttttttttttttttttcagacagagtcttgctctgtcacccaggctggagtgcaggggtgtgatcttggctcactgcaacctccgcctccctgcttcagcctcctgagtagctgggactacgggcgcacgccaccatgcccagctaattttttctggctactgtaaaaatcatcatcaaaccaggtgccaggactggcagcctcttcttggatcatatcaaggagtttctctgcctttttcccagccaggactctcaagcggaagtgctgcctcttgccagggtccacccgtgatttgttctgacaatgtattcatccagagtcacatttttttttggtctcactcaccttagaaaataccgactcctcctatttttataattaaatagactataagtgtccgaggagaaatggagtgtgtccttccccctctcgtctcctagacagaggcttagcctacatatttgtgggtaatgggatggaattccagaggccacggaggaaatagccataaaccctataaaaactgtgtgagcgtgtgtgtggagtacagaagaaacagacaaaacccatgaaaactgtgtgcgtgtaagagtgtgtgtatgtgtgagtgcgtgagtatgtctgtgagtgtgtgtatgtgtacgtggtgtctgtgtgtgtcttagttgcaaagcaaagcagaacaaagccccacatgtatcttcacaacagtgggagaaaaggcctgatacaaggagaaatctgtttttttttctttttttataaactgtgttgtgaactgtgttgtcaccaaccacacacaatgtcatgaaaggtcacaatctaggagacgcgtgaaggtcaacgtcaattatactctggctacgcaaggtgtcatattcgttaatatctgagaaacacagtagtctgagagccgggataggaccacggcatggtggggtgagtgtggccttgctctaaccctgagcgcagggggcggggcaggtgcagaaggtggtgtggggacaccctcccagtgaagggagacttgagatcccttcctttatgtgttatagagggtattctggacagtaacttcattcttgattccttctgtgttgtagttgccttcttagttagcctaactcttccataaagcatgtgtatgtatacacatatacatatatacacctcaaacattgaacatgtatatgtgtatatccaagcatatatatgtgtatctttatatactcgtatacatatatatgcttgatgtttgatgatttctccattgatcaggtctcttctcccattgttgtgaggagaaatatgttggttgttctgctctgcttaggaactaagacatacagaggtaccacgtacacactcacactcacgaatgccctcacacatacacgcactgttacacacacacacacacacacacacagttttcatgtctgtttcttctgcagtcacatgcacacactcacacagtttttataggttgtatggctctttcctctgtggcctctggaattccaccccactgtccattaaatatgtgtccgcttgacgtgggttgtggaggttacaaatgttagagaagaacttggaagcaaatggtatctttctcttccaccttctctaaccaaaaagtgaacaacaaggtttacagtcacccctaactagcagtgttagtaagggacactaaatcctaaagcctctggagaaaaatacaaataagaaatagtaggaacaatggcaaaagactgcgattactttcacaccaacctagtaattgtgccatcggcgggtgaaagtaggagagacacagagtgcagagactcctggtcacacacaaattcccagatgaattacactgacaagttgtcacacagaataactagaaaggactttcatatcatcagttcaacctttccattgcaaagtcaaggacatgacgcccagaaaagtccttaacctaattttggctgtgtgctttatctgcactaatatacagaatttgcagcttagagaccccttctcagaatcttatttccaattgacatacacacacacacacacatacacacacaaaaaaaacacacacagccacacatgggattaaagtatgcatatgtgcacataaataaattactctgaattctactcttcaccccatgttaataagccaggagaggaacgtcttggagatgcaggcctgcacttttaggagccgagcgcagggctgaggagtgagcattctgctggcctgtcctgttgttttccactcttctatcctgtctttgtgaagagtaaatgtgattacaattttaagtagcggttgaatacattaaatttatttcaggttaactgcctgcttttctttaagtctataagcacacatgttcatttaaatgtttgggtaatatttaggaaaagaggagaaaatagcctaaaaaaagagattgcttacaaagagttgaaaatagggaaatccctggcaaaattgtgacctatggctctgcctccctgggcctgctgcaaccgctccttggtgcaatcccagcatccacctgctgccccaaccccagaattgtcacctcagggcccacccttttctggagcacctctgaaggttgacatttttctcacataagaacaagtacctgtctacgtatttaactctgagtcagtggtgtgttgaacactctggtggctacagagtaaatatacccggtcttgggtgttgctttgccacttcctcgctagtgtaactcggacaaatcacttccaagtctctgaatctcactttctggtcttggaaaggtgtgcctttctattctgtcatgtggggcttttgggaagcataatcaaaagagataatgcatataaagtaccttgttaactgtttgtattttgataactttttttctcgtgagaaaagcttaacctcgatgagtaagtctagtgaaggggatttaaagcacgcggcagctgcatcagcgttgggtaagttgttaatctttctaagcctccatttccttatttgtaaacatgactagggtggatattctgtagagtggatagatgtaaggaacggctgagataacgtttatacttagtgcacccaatgctgaggttggttggtgatcagcaatatctaggactggcagggctgggaacacatttttctttacaagcaaaactcaacttcagataccaaccaatttcacctgaactgacaccaggctaagagatgtagagtcttttgtttacatagaaattgcataagcttgctgtggagcctcctatgtaagaatttaataaaattcatcatttccagccctttgcataaaattgggcttagcaagaggagttcattccataaaaggaagtaacctgtagtgaagagatttctgaacaaggcaggaaagcaggtagagaatacctacatccaaaaagcaaccatagacggatcttcttactccatctatctccaacaaacaacgacaatgacataccactggcacacatagatctctgcattctttcagagtgctgaagagctcatgacagttagaatgacaatgagattctggatccacagagggtccagggttttcagtacttacataggataaagtggtaacatttaaaatgcatatccctgaagggatgagctactagaaaattaattatcctctctttgcccccctcacagcctctctacatcatttattgtagctttggtgtcccactcccaccactaattttctttcttgagctttgtcctcaatttctgttgctacaatgcaatatcaatagaaggaagaatgacaaacacacacacacacacacacacacacacacacacacagagagagaaatcctgaaaatgttccattgatctagagcagagaactaactttggatgttgttggcattggagggactgcagaatgctgaaaagacactactctgaaagtcctgtggccatggttcaagacccagctctgctacttactcactggggactcagccaggctcttaacctccatgagctgcagttacctaatttgtaaatggagataacggtcactgcactacagcctcccagggcttgttgtgtgagtcaaaggtgacaaacactgtgccatctctgtaaagtactaaataaatgcctggaatttgtgttatccttttagaacaatctcttagcttgtcacatcgaggaccctctcccctcagggacctttcctccatgactgtcctctccgagtcatctggacatagtctgacttccctgccacctgtatctgcaggaagatgctttatgatcgctgtgttcctatgccactccagtagcaacatcaatctgcttctgctcattgtacaaacatttgctgagtgcctactgtgcctcagacggtgtgctaagtgctgaggttggatataaataaattatgattcttactgttatctacgaatagttaacctcagaacatttacctactctccagccaggaaattcatgctgaatctcaaatatgccctttctggtgttaggttacacctgttccctagttctgcaacatctgtgtaatgtttgtgtgttgtttatctctagacctcgtaagcccaaagctgttctttccgagtggcataggatcgtatctccccaatcactagcatttctccaaactaaaaaatctgggtgatatcattttaattcttcctctttccaggtatgaggatgaatgctctcagtttcctgtggacagtgcctctcaggcacctctggatcttttcaggtaggcccacggtcaccctggctgcactgcttagcggggatgggagtcactcctgcctgcgcttgtgcctccagcttctcccgctttagctcctgctctgcggggctgccaggctgattttccccccaactaatccgaccccacagctgagcatcccccttgctccggatttcctccacactgaggtgtgcagcctagatcacattatcacatgctcacacggtgcctgtgctgatcccctcagtggctgagatgtacctcaggtatcagtgacacgattttaatgaaggcagcttctgttctcaatgagaaggatttggaaattagttccatcagatatgtggcaaaggctgccttctacaacaggaaagggcaggcaggaaagttggtggcagagtgtctctcaggcgctcccatggcaggagggataaagctgagtcccttaggcgtgcactcccttctgctgatggcatctggttggcagaagaaatgagatacccaccttctcaaatggacagaagatacataaacaccttttgtttttataaacagacaagtggcagctcggaaatttttctgttttctctcattgcaaaatcaatacccatcagcagtttgaaattaaaggcaagattaggcctcagttttatacatgccttattgtcttccaaaagctttctactcagtcagataaattttctttaagaggattaggaaactttcattatctttatctaacctgaactaacactatgtctgaaaaattaatctatagactggacaaaagctgatgctgctgggagaagaactctggggcttctttctaactgagtagtggggtctctacatccaccctctggtaattcaactgtcttccaaagaaagagcaagtcactggatcactaagcaagaggaaataattcagctttctgatctccttctctgtggcctctcagtaaaggtacaaaccagcctgccaaggatcccaagagaatgtcctcccgaagagaagatcttcccaaagagaagcttctccccaagagaacgtcatcatcaagagaaactcctccccaagagaagatcctccccaagagaatgtcctccccaaaggaatgtcatccccaaaagaagatcttccccaagagaagcacttccccaagggaagctcctccccaagagaagctcttccccaagagaagctcctccccaagagaagctcctccccaagagaaggtcctccccaaaagaacatcatccccaagagaagctcctcctcaagagaagctcctccccaagagaagctcctccccaagagaacatcatctccaagagaagatcttccccaagagaatgtcctccccaaaggaatgtcatccccaaaagaagatcttccccaagagaagctcttccccaagagacgctcctccccaagataagctcctccccaagagaacatcatccccaagagaagctcttccccaagagaagctcctccccaaaagaatatcctcccctcccacccccacccatcctgactgcctctggacttcccaggccacctcagagggctggagccagagagtagcttggcctggaatgcggagactgaggagctgacctctgaaatagatgccatgctgtccttagactttttctgacctgaagcttggaggtccacagggagaccccacaggctgccacatcccacccaagggatcgctcagcatgtgttatggagaacatccttctctgttgctcagcccccagcccattatgttgtgcattgactttgatttgcttatatcatctatcttcgttcttgaaaagggataggcttgctctgtttgagtctgtttctctacagtgcctgacagttcttttttatttcggtgccacatttcctgaatttgaaaataactttgctgtcaaggccacagaggtgccactgaggtggcacttccgatgccgagaatgtcagctcctctggaaccaagcccaggtgcaggcaggtggggtagtgagagctcacagtcttttgttttctacaccctcagaaacgttcaacagatagcccagctcatctccgatgactgatctcaccaagtgcctctgtcgtcctctgaggagaagtatcagatgtgacagttgtcttgatctccagatggcaggcagtcttgtcactccagagctgtgggtggacgtgtatggagagtggaaacccgcagcatctgtagatgtctgtcggatggcgtgtgtgaacgcctgaaagcacgcgaggaggggagcagggcttggaggctgggcaggagcaaagcttcaggcagcatggcagtgccaaggactgctggggaacagcagtgacagcagacagctctctggccccacacatgccattacaaatggctacagaggcaggcctggctgcttgcgccaaaaggaaagaatgggcaacctgaatcatgcaagtgactgaagcatgaatagacagcccccacgcaacctctctctaggaaaccaattgaaatgagcaacatcgtggtcctttttttttttttttttaaatcagagatgaggaatctatcttagctaagcaaggatgccatacacatttcacaaactaaaaaaaaaaaaaaaattctgttggatctatgacagatgggatctgataaaaggcagatgctaaagactaaatcacacatagggaccctttctgagagctcactgtgtttcctcaagatatctgcaaacgaggctctgaaagaagtccacccgaacctttcatttggtggaggaaggatgcatcactggctgacggaactaatgtgcttacaacttcattcctgccgtgagccaacacctgacagaaatggctttacatggtgatgatagttggggtcaagttcaaaataagttcatttggattgctgccttgctttaaaatggttctcaaattcttggaactgctatctgcatgtgtttttaattcttaatatttaatatctgagaatctgacatttcttcagccccatttttgaggtgtaatatgaaatttaaattaaaaactattttaaaatgcacgtgacacaattcctgggctatgtcgattcaagtttttaaaggagaatggaagaagatgctaagtcttccttcctccttctccctttttaaaattgtctgaatttattactaacattaacctgcagatatcattctgactaatatccctcttggatctggacttcattgtctggctatgagagagtgtttaaagacagcagcaatgccagggaggacctgcctaaacagcactcagagacccctccagagcatgcatgaccagcaactgtgcgaaaacagtcatgtcacgtagtttctcattggcattattcgtcttttatcatgaaataagcctataagagaattaaaaggcactgagagtagtactgtatttatctatgtttgcatgtatctcactccagctccagagtgctaagtaacttacgagagctcaatacgagtgcatgttacacaacgtattgatgagaacagaaggactagagataacatttagaaactttgagaagatattcagcacttagttaagtacccattcgatgggaaacattccaagacatatagtcaaactctgaattcagtagaggaagatgacttttgtgtcttcgcacacaggtagaacaaacaccaacactgttcttcccctccatcactgacgggaatggcaaccccagatccagctgggacttaccttgcactattaggtgaacccgggacgttttgggatgattgtctgtctgcacagagcaggtgtacggaccttcgtcatacacatccacattttggatcatgatgctgtactgggttggtgtattgaccaggatgatcacacgagggtctatggaccacttgtcattcccagcgtagaggatggtgctgcggtttagccaggccacccgggttacccggtcatctatggtacacctgcagtgaggcagggagtggtggagggaggaagaagggaaagagagagagtggagagattatataatatggtaaataagacgttgcattttgaggagtaaatgaaacaacaaaacacagtgctaaaaggaaacaattattgatgaaacttcctaaatataaactaagagtgaccagaatcatcttgaagaactgacaatacaaaatcatttctatttgacttcgagacatattatgtatctttgccatccatttgctttccctgttatttttttccccataggcttatatgaaaatcagtttatgtttcttgagcacatttaccaccttggggaagaagtggcccaggggcacatgggagagagagtggatcagcatttcaaataggtcacagataacccacaaagcaaatacttaacttgtagttaatcaaaaattgaacatatttacctccagacctccctggtgttggtaatctccttatacccctaagcagccgaaagcctgcaaactacaatttataacataggttggtaaaattcaccttagaaagccaacacttcttgaggaagtcaaaactgcatcttaggacttcaggagaggaaaaagaaaattatcagcagaatccctgttcctcatacactccctgtcccattgggagacagaacaaggctattatcaaagcagggaactgtgcaacacctctcacctactctccttaacaattcaaagctatgaacacaaacaaggcctgtgtgtcagtgtggatgacctgcaggctgtcaggtctgatataggactgaaagtgttggacgtctgcgcatgtgcccaggaactgaggacgtgggaatggaagcatgaggaaacagaatgctttctaagtgtggaggcacacccatcactccatgctgcacataggaatgcacaaggacaaccactcttgccaatgtcctggcagagagaggagggacttgagtccagcacctgcaggtgaggagaacacggggaataggcatggccttccctcactggatctgacctaacacttgggtggcagcagtgatccttcaggcaggtctcaggagatggaaggaccccagagacactggccacagtggagatgtcaggacctggccaagtgaccagtctcacctggcctgcatggctcagggtctccaagcaccagaaccatgaccctctagaatggggaaagcacctgatctagggcggtcctctccctggttggtaggaagaataaaagcaataccagcttccggtcacccaggcctttttatgagctggcccatctgccctttagccgctgagaagttgggtagggagggtgttaggcactctcacaatattgcaggaagacattgttcttttctaaataagcatgtgaacaatacaaagtgaataatgcatgtaaataacactaagatgatacagacccatctaaccattcactcctcaccaatgcccagcaccccatggtgatttgctagcaacttgttatatctcagtctacatcttactccttatacacatgcatgaacttgtatgaagcttgtgctgatttgctttcacctgaaatagaatcatactctaacattccaatgaaactatttttttttatttgaccacaggcatcccttgcacaccagcagttacagacctcaatctgcatactttctaggtaagcgagtttccagggcccaactgcattcaccagtaggacctgataatctaggtaccatcgaatgattctttcacatcattatagaaatgtcattggtataaagaaaaaatgaagtcatgttatctcctccacatcgtgaggcatcttgcttcttttcctgttgctttcttacttccatagcatttttctatttcccttatgaagacctaatggatcttaaacgttaatggatcctccctgctccccactttcaaaggcttttcttggggaaaaaatatgataaatttattcattctcagttgcaaatgactgataaggggaaatatgcaacctttcctaaggataggtgaattttcataaaggagaaatccctgtttgaagagctcctcctaaagaaagttcaaatagtagaattccaaaaatcagcacacctggaattagatgctaaattgagacagagtgaagggcgtgatgttccagtcgcttctagttgtgtggtcttctagtcaccacacaacccaagtgactaagtgcaaacaaatattgctttaattttgcttagttatgtaaccccttgcacattcttaagttgccataaaaaattgtaagctacaattgaaaaggatgatttttttggcctttagaacatattcacatttaaaaatttttttaagtcacaaaattcctgtgtgtgtgtgtgtgtgtgtgtgtgtatttgttcagtagaatttaaatatcacagtgattaacactcctgattatctgctttcaaaattcaggaactaactctttttctaaaagtcataacacgtgcattgttcctttttaaactggaacttgtttttccactatatatcttctgcagaaaaatgtactttatgcttgaaggtcttttattgatcacctaccatatttatttgcaaccaaaaatatacagagattgaaatttaaatttcttttatgtcctatgaccataaaactttaagcaataatatatttcttaaatgaatgatcattacaaatataaaattgatagaacataaatatagagcacatttcgttaagcaataattaaacatgaaaaagcaaacttactagaaatatagcttttaataagagggataggcccctttttttaaatgccgtagataaatatcactcactgctagaatgagatggagttcaggatcaattctattcctacttttgcttttagagaaaccttgttcacataagaagatggaaatgaaaattgtgcatagcaatgccaactcaattatttgaatgctttccaagatatatgccaaaaatcacatagtaatatagcttcaaagataatttcaatgatctcgcagctgacaaatcaattaattcctctttcaatttattttaatgcaatgaattggaaaatacctgactcgcaaaggggtttataacatggcatcaaattcattcaatttctcagtatctggaaagtatatgataccattttaccaggccttatcagatggctgcaaaaagatgttattcttttactggaagtgccttgtttaacccaatacactcagaaatgttgggaaaatacaaatactgtttattttaatatgctaaatcaccgagccctctgttaggacatgtctcatctccaagttctaattctaaatggagaatgcactagtttgccatgaatctgttcctgatgcaatcaggtgccattgcctttagtgccctgctttgcttctgtgggagtctccttcaagactgataccctgctccatgacagtcggctgatggaggtgacaaagaaagccaaagaagtttatctcctggacgaagtgtgaagtgggagctgtcagaagggagacacagaattacactgcaacctcaggcacttactcaagcagatcaactttagggaatttgagatctttgaagtgcatttcctgaatcctatcgttgtccttgtataggaccaaccacttcaggttgagggtgcatagaaccagtgcaagtggccacaggcttgagtaagggtggactttgaaaaagggcaatccaaaactactctgtgggccagaacacactgtcattgccctagccacacagcccttggaaagcctgtgtgtcccttgggtaatcctctccctggtgagtagccatgatccggtgtacttgctcttggacctgggcctccttatgggcctggagtagaaacagaaaagagtaactgagtaaaagccatctctctaaatgggcaaagatggttcacaagtttgtatggttctcagaacctaacaacagagaaactgagggaaacaatgaaatcagttgaggaaagttattttcctcatgatgttgctctgcttcaaaagaaaatgtagtttcatggcttcatgctttcttccatcaccataggactcttccatagtcccctgaacagcaggaaagagaactcagggaaggacttaaaaagttggcttgagtgctcttctaaactcaggctccttccctgctgtctgtggccgtgtcctggactctcattaacaagaagcacagaggggaacacttttgaagttaaataagggggagccaagaggcaagttgaggaaggctaatgacaactttctgatgtcttggaaattatttcagatatttaaaattcttacattccaagctaaccctacctactgatccttgataaaacagaactcattacaactacatcacaagtaacctctaaaattatatattgcttgtactgcaccaggcatagttgtaagaactttcaatatatcaaatcattctatcctaataactaccctttgagatgtgttctattaatattatatccacattttacagatgaggaacccaaggcacagataagaaaaaaggaaagctatctggaagacacttgtacacattcttaacctctagccatgtgtgaggaaagaaggtataaatgagagtctggaagagcaaagaaatgcctgacagacatcagaaggcagagatgtttctgaatatgtaccgtggggttaagattcagggtcgttttgttttgttttcagaggaagaggtgaacttagggaaatccatgccttaaagcagtggttttcaaccttttctgtgcatcaaaaacagattgctgaagccagcccccaaagagcttttggttcatgggtctggagggaccaagaatgtgcattttcaacaagttcccggatactgcggctctggggactcctcctggagaaccactcactgccttaaagaaatgaggcaagtgacaggttggaattttaatcaaaataatcactgaaaattaaaatcaattggctttaacttttttgtgttctttacttttgtttttatattttgtctttgaaaatgcaaaaaaaaaaaaaaaaagtgccaagattcattcaacagatatggagtgagtgcctaaggtgcatgagataacttcctaggagctgagaacacagtaggaacaggccgacaaagttcctgccctatgaaactacacctagtgagagacaaataaagtatgtatgtctagatatatttgtttcagaaggatacctggataaaataaaagaaggtaaggaatggagagtgtatcatgggaactgtggatatatttggaacagaattcccaagaaatgcccttccatggcctcatgccagacgttgaatggttgaatgtttataactctaaagttgggtgcaataagatgcatgtccgaaaattgtgtctaactttacaatgaaattctcatctcacatacaggcacagatagctgcagggacatttaagtgatctgggtagttggagaacaagtcttttaaaccagcctcacaaatggtgtcctcatatattgaggactttgtacgtgttcaaagaattgataattgatattttgataaactgagagttaactagaaaatgcctttatgtttcctcctttgttacggtaataatacctaaaacagggtgcatacctttgtgttttaattagtagacaatggcaaatgtagttaaatctctaattcagactccattctctttgtaatatacggataataccaaagatcctagactcttcatagagcttacatcactgaatttaattatttatactctcatgtgttaaactacgaatgtcacatggatagtaaccatattcagtatcaccagcacctcccagcctctacccaggagctagtaggtcatcaatacatatttatagtgataaaaggtgtaagacaatgtttttcaaatgggcatcaaaagaacccacataaggagacttatatgtggggacatatatgtgtctttctgcaggataactgaatctatatctttatctgtatctacatagacacacatagagtccatgggctctttatgtatatttttcaatttagtgttttcatttctattgtaattgggagatgtataatataaacctatgctagatgtggtatgacaacaattaaatttaaatgttcagatttgcacctgtgttcaccacactggcacattgagaagtccttgcatcatatcaggctgatgacaaaaatacagaggtgactggctttgtcagtgacgccttcctaccagcaaaagctgaatgatatgggctccactgtagtaatgaaggttcccaagcgctagaatgagccactgtggaaggagaacttcgttatcacaggatgagcgtggaacccagaagggcaggccttacagcagtcagtgccacatccacattgcaacctgggatttaatgttgttttttttgtttgtttttgtttttgttttttgttttgagacggagtctcactctgtcgcccaggcttgagtgcagtgacgcgatctcggctcactgcaagctccgcctcccgggttcacgccattctcccgcctcagcttctggagtagctgggattacaggcgcccgccaccacgcccggctaattttttgtatttttagtagagagggggtttcactgcgttagccaggatggtctcgatctcctgacctcatgatccgcccgcctcggcctcccaaagtggatttaattttaataaaacatcatctgttccattaagttaatgttccaagtttaaattttagtggctatatatgtgcataacttataatttcagaagttacagtcatatcagagtgtaagcttaaggcatttatacctagttttatgattgcacatatataaagtttttttttaatagttaccactggaaatccatgaaaatcttgtctctcttcccatccttgacccctgcttttaaagtggtcttctatagagtactcaatttaagaaatgctgggtggaattttaaagcccgaaatgcatttctctgaatttacttttttaatacattcccccatattatcttgtaactttttggttttccttttatcatttgcctttttcataaattgagagttaattgaatttttgctaagaaaaacctgactatgtatccaaatatattaataatgccagtccaaaaactgggaggaagaccttgctttaataaactcataaaccagtgataaataattttttaagggaaagaagaacaggcaagccaaaatgaaatatttttagatcaactcccaaggtattctaaattgcaaaagctgttctcccaggaggctttaactactcatttatttcctgagttacaaatagagccaacttcagagcatcaacagggaccctaaattatgtaagggaaaactttatgattcagatagttggaaatgcaacgagagtaatcactctgctagagctaatatttgctgataaggtattggttgagaatgtatctgaaagcctctgcagaaaaatggtgagggataagagctacttaaggagagtacagcacaaaaatatttcagtagtgcaacgggttgactttgaaatctgacataacatgacatctgccactcgctggaaaattggaagacagtgccacactaacaccagctggaggggagatgtcacattaatacataggaagggtgcatgcccacgtgtgtgtgcatgtgtatgtgtgtgtggagcgggaggggaggttatgcagagaaaacacactaatgccttcaacgtgagggcctgcaacatgaggacatagagtagtggaaacacaaccaagggaggttgcaggctttcctgaaaacagcatcacctgaggcagaaaatcagccactggatgataatgtgctgcactttcagccatgtctgatgatagatgagtccaccagaaattgctcattgtgtcctgacgcaaacaaggggaatctctggtccccacaagcacagtgagggctctacctgaatgcagaaagcaatttctcacaccacgcaagtgaggcaactgtgctgacggcagctcagaacagagtatctgatgccgggaaggaaaatgaaaggagtgatttatatggaaagatggctccacaaagaggcagaaattgcttacaactacagaagtggggttaaactgcttggctgtgggaggagagaggaggagaattcctatcttggtaaaagaagtaaagcgtagggtagcgaaacacaattataaaaagtaagggtgagcagaaaggccagagaaagctctctgaacaaaataatgaatgattgagctggtttcttcccaggctccaagtcactctataaatccacagggtatgttgaggagatcacattactagtttcccaagaagaggtaggcaaggttgaaataaaaataacaacaaaaaacatctgaaaaggcaatacctgctttgaaggtccttatgatctcagacaaatgatagaacacaagagtattacaaaggcaccctatcacattcatggatacaataaaaagtatacatctgtccatttgtttaacaaatatttagtaagcacctgctaaggaccagacactgtgtcaggccttataaatagaacatttaggagagacgccccacctctaccttcatgaagctcgcagatttgaggtagcaatatgcaatacacaaagtcacagaacactgatacatgagtacaagctgaattaggatggtgtcttcgtccatttccattaccataaggctggtaatttataaagaaaagaggtttacgtggctcacggctctgcaggctgtagaggaggcatggcgccaccatctgcttctggtgagggcctcaggaagcttccaatcatagcagaagggaaaggggagttggtatcacatggcaagagagggagcaagaaagacagagaggagatgccaggctcttaaacaaccagctctcttgtgaactaacagagccagaaatcattcctcactcattacagccaggagggcaccatatcattcatgaggaatccacccccatgacctaaacacccccaaccaagccccactccaatcttggggctcacatttctagatgaggtttggagagaacacacatccacaccatatcagatggtcatgtaggggtggcatgggcaagaccttactcacacatgcagtctagagactaggccactctgaagaagtaacataattgttagattaacagacaaatatctaaagctgataactcagaagaaaaactaggtacaagtattgggtactgatagagtcttagatagaaggcagggcagccatgtggggtctgggattgaggttgactcaggtaaggaatggagtggaagccagagtagtccaagcgagatagacaaggacatggttgtgttccacagggctgcagaggtagacatctccatggtaaaatgtctgcataggtttaactataggcctgtattttatgagaataggctggacttcttttggagaatagactgtagcagggccagaggcagaaagaatagtgaagggaccattgcatccctatagatgtgagagtacagtcacatgatgaaagggtctgccgcttaaggaagagcttgagggagctagagtgaaggaaggagtcatcagagaatcaggcatgagatgttgatgaaaagtttgcagccaacactttaacgaactttgatgtcaaagtggagtggggaaaagacacagaggtagaggcaattaggttcttcaaagggtttttgttttgcttttttgttgttgcttatttgttttaagagtaggaacacttgggaactaattaattcattttgcaaatatttactgaatacctattgggtgctgggatgtttctaacttttgttagcctgcatatcacctgtgcatcttaattcactaaatccgagtggggaccatggtctgcatttccaacaagcccacatgctgaggacttaatgaactttgagtagcctgattttaggcagtagaaacaaaactgcatgagacaaggaccaggccttcttacattgcagtatgtaagtatatatactaatgagaatgatcttatcaatgggagcaagtgctaatgcaggagaaaggggataactgtcagagaaaagttacagggaaagtgagaaaacattagatataaagtatatgaaggaaagatgctctatctgctctataagagaagaaaaaataagagaaacctgggtggctttgtggattcagctatgggaaagccaggaggcaatcttttctccaaagtggaagactaagttatcagttgaaggtaaatggaagaacagaagaaaggggatgaaggatgcaaaaaagtgaaataactatcgcagaaaatgacatcaaaactactagggaactatagtgggacttataggctatgttgaggtcccatttgtagttggtggtcaagaatttgtagtgacaatattctgctagctttgagaatattctccagcaatgcctagcttcaggcatagagaatgtagatgatgggtttatcccgtgttggagtacgccaagtgagcaacagggaggaaggcaaggattacaggaattacaaaatattgaataaaaatagtgaagataggaggggctgacggatacagagaatgtggtaggctcaatgcattagaagtcttaataaagtccttgagcaaatcagctggaatgaaagaaattatacacgatgaaaagttgaaataagtgtgaaatgagcaatagtcacccttgtcaatgatggggatgtgaactaacttagaggcaagttggttcttctaagttcatattgacaatatcaagaatgatgatgagagctgagagttctttatgaggttttgcgaaatgtataaatcgagcattatagagataatattaatatattgtggtgttcaggagaatgcctgtcattggacagatgtgggctctgccacttactaacacagagcactaagataagcattttgtttaacctctcagaatcttcatttgtgcatctgtgaagtgggatgaacgtattttcctcatggcattacacagtgctattatgaggactgaagaaagtgatgcgtgttgagaataggaattatacttggtaaatagtgcctgctctattagtacgagcactgttgcctcatctggacaaatataattcaagctctatgatctaagagtgcatgtgagtttaaccaagtgatactgaatccgttcgcatatccttttccaagcagttctgatgccttctccttctgtacttccaaatctataaaaacggatattgatgtggtattaatcagaaataacaagaaatttacatttttagcattactagctaatccttctagggctgttccagtctacctatagattctcgtacttctagtaacattttctgttttttcaaaaatgtcttactctccagaagtgttctatactcaacctacgtagaattctgcagtgggatttcatttccctctgaggtttattttctcagctatagccactgagacaactttaactttttattttgatcaggcctttttcacagtgtgttgacacagtggttgatgggctggtttctagattgatgtcctgtggttggtgaaatgctgtatttctaaaaatacataattgggagatcaatcaacacaattgtgcacacctgaagcagaattcagttggcccacaggccccaatagcttaggcactagtgttgtccttttcttggacagcgtcagtgtataaacaggatactgctcagtctagaagaaccattctcaagcagattgaggcattcctgaagtcagatgccaaccatgtgtcagcgctgaaggagatgagggacatggagtgatgggaatcagatcacaggtgaatgggttaaggagcttcagagaaacacatccaattccctaaggagacattcactgcacagatactgctgggcaccatggaaaagggaaaagggaaaattattctaagggtcttactcccaacccaaggtgacaccattagctagtgaagcagttttttggagtcagtaatggggctgcatcttaggaaagatgagtaaccacagattttagcaaatggtatctccacagaaaaatgcactgagcaagctgctcgggtattgtcatctcttcttttagagtcacagtctggctttggaacacctttatgtccaccttcttccatcgtgactcacttaaatggtggtgctacagtacaaggcaaagccatttctgaagcaatgagcttttgggtatagaagaaaagtgtcttttgaggcaagaatgataaaaagtctcttctttcccaatatccagccccattttccatctttcccaatatccagcccctctggtcatcagcaatggtttggagttccacgtaaagttgtaaaaggcaatgaaggtatagctctcacacctgcctgcttgttatatagagccttttagggagctacccactgactagtcagggatgccttaagaagccacccagaacaattcttgttatttatttgtcatctggctctgactctgccctcccttcctccacatcctgaacagctttaaaattcagcctcccaattttttcattatgcttggcaaagaagtgagcaagatgaaattaaaatgtttcccaagcacacaccattttaattccattcaatagattatcctgacatatttactcacgaccatgtctgtctcagtatcatccatggaaaagtataaattaaaattttaaattaaaagcagagagtctggggagcttgatatctttttgaagaatggcgcaagtcagccacaggctcccgcacaactatcgtgggagcaaagacttcggcagtgcagaaattacagcccacagatttccctacaaatacctgcctacatataatgtacgggatcacagaatcccacagacgggcaagaccacaaaggccattcttctttctccagaactgtgcataaacaaacctcctcccctttttggttcaaatgaaactcacccagaactgctaaaggactgatttatttatggaaccaaaaaatatactgaaaattgatttgcttttattctgtccataaaatttctgtgtagcatatggggtaagataataaatattttaataagaagtatataagttccagtcacaggtctataatttactaaactcctgatcctctgtgaatatcagttttctcatttggaaataatatttgtaaaaaaaacaaaaactatagattgtagtgaatatccaaagaaactatttttttttagcactgttgccacagttctggagcatagtgaatagtcaataaatgtttgctattatatttacataattacttactactaaagagtaatgatacccctcatgttataatgatcttaacttttcctagtgttcatctctccatctacacatacatcagttttacagtttggaaaattaagtaggacatccatctcttccaatcacaacccatagactgtgctgcctcaagtttagaaaacagaaattgtgtgtgttcaggtgactgtggcttaatggccaactagtaggccagtagctttccttgattcatcctgtgccatcctgaacagattacacatctgaacaaaaccttatttgagtttttaaaaataaaactctcatgaaacagacagatgggcagggacagatggcggagaagggatgggaggtgaagtcttcaccgttcctacagcattgctcctgtagaatgtcaactctgcctgtttaaaaatatatgctatatatttttaataagccaatcatcttttccagaatagtggcttattttatacagattatgcgaactgtctctcctaaaaaataaaatagaaggcaggcaaaactctttccttgggccatgaaaagcccagagagatattccctggaggcaataaagccacagggttaacttgcaaatgtttccagttcaggcaccaagagttgctgcttttaatttgtgtcacctagaaatcagcaccaccagattgctaatatgggaggaagagggtattcttagctgctgagactctctgaactgctccgaggcaaccaaaataacagggagtctgacccgaaggtaacctgaatttctccagccttctccattttactcatatgtatgaaacagcactcaacatgtgggcaagacactaagaaagactgagcttgtgggactctctgtagaggaggatccttccatagaaacttgtaagggtttaagaagctctggcatgaaaacccaaattttcattataagtagggaaagtcgagtttccttatcatggattttaaataaataagttgagaaagaaagagaaggagagagaaaaggaagaaaaaaaagagaaaaaagaaaacgagaagaaataaatctttagaaatgcatatgtagaaaatgtataatttactctgtactttacagccaatacaccaccttaattgtgttctgctcaagtgactattgaaattattatgcacttcctcagcacactgactacagattcctgttattctgtaatgattcttttgtaacacttccctatttggcactcaacagatctgctgtctgtgctcttataacttgacctcacattgcccttgccatcagtccagctggggtctctcattctccttttcctgctcacacctagactagcacaagtcctacttaggccacaggtacaaagagaagggtccccttctactcaaattaactgtgggaaagcaaagcacagcctggttaagccctcggggattgcagcagagtggagaattactcctgtctcagttcattataatgaataataaagaaatacttacatgtgctttttagtaaattattcgtcttgtgcactgaagaatcagggcagtaatacgcaagggaaacaactagtgcatttggggtcctaaagtactcaatctaaagcattttcaaagaccatctcccaccttcattaagcactgaagtagttgtggatcttggaaagaagcggcttaaatcaaacacttccatctccctccttgctctctgtgtgtggctccctgtaaagctgatgctatttaaaacatatttgttattttagcgtagctccaagtctcttgaagcaaccggaaaatctcagcaggaccaccactttgctgtctgcagccatcatcaggaggtaattaagagagcgagaattgtttccaaaccaataaagctcttccacgaccctctattatccccatattcacccagccccaacccctctctattaacaggagatccattgattcctgtaggagacaacatatttagcttggttcttcactgcttcctacttgatttcattgtactgtcatttgtccatgcttaggggccaacatattgagatgttttgaaaaccatcactgattgttgtaatatcaccttcattccagggtaaatgaacatgaggaatgaaatattttggggcttcagattttgcttctctaagaaataagagactttgctcttcttaggccttcatttgtcaagcttaaaaaaaaatcctaacaccatttgacctgttgatacttctaagtcatcaatgcatattagcaataaggttaatgctacacaccttatttggtacagtttgcacaagatgcttgccccaaatgaggtctggcaccattcactgatgagtggtatcgtccttcctgacacagcacagttaatgtccgctcatgacttggtcttgtccttagaacgcatgggtgaagatcagaggtgatgttcatgagcaaaaccaaaccaaacataaaatgcatgatgatgatgatgatgatcgtgatggtggtgcaaacagagaaaaatagatcacagagagatggaagtgggtgggccattggggcatcagacatgaggaaagtgtctctatgactgtcctcaaaacgcaagggagaaaccaagtgagaggactattttcaggagtgagaatcaagaagccaagcaattgttttcaatgctgtcactgatgaccaagagacattattgagctcatcaactgcacccaggttgattagctgtatttatgctctgatagggttggggcagggttgggaggtggaaaaaagccctattttgaaaggggtcattggctcctcagagtttgaggagaaagcactttctgttttggtcattgagtattggaaactacacttctgacaggaagaaacacgtatctgtaaccatttagaactccacagggagaatttttccacccattttttctcaccttatgatgacttgtcaaaacagcaatcataaattttcccagaagcagaattggggccaaaaactgaatagcaactagacagcatgaatccaaagggtagtggtctctgccactctgtgaagctccactctatcccattccttccttcccttttctctcctaacccactattagcaatttaccctgaggccttcctacttctgtactaccctggttctacctttttccaattgaccagtactatgaaaatgtatattgaaagcatataggcagtgtatggttgaagaggctcttcaaagtgtttagataaagcagacaagctctgacaaagctagctaataaaccaggccaggaggtttttccttgaaggtggctaattaagaacaaagcaaacatacactaacagtctcctctaggcactgcgttcacctcagaagaaattttactataaatccagaaaagaaaacttagcatcacagcagagcggtcgaagcagagagaactagagaggcttgcagctttgctgtgggtggaaggggcatccagggaaaggaaatccaaagcctctgaaacaggaagcatttaaatctgcaggaagctgagccaagctcaacagatggcaggagaggaaacctggcctcaccattgaaggctgaactttttggcagggtgaacagccccagtgaataatcagatttattttgtgttgtattttttaagtggaaagttcgacttgatctcttgacaaaagaaaatgtcacccaaagtctatgtgcacactccaagaaacccaaggtggggtggcacttgtcttataaaattaaattaattcaaagacaacttttggtgactttgagggtggtgataatggctgctttttaattaaagtttattaaattcttaagatcataatacttctgagtacaatttttcacattatataagtgattcaggaagcttatgaaaaggagtatattaaaccaacacagagctcactctaaggtggaacaggtagggtatttgaaagaccttctcattgctgagttgcaatatccctctctaaggcacatccactggttctagttcttccttgtagcagaaataaatccagtgctgcttcttcatggcagtccttcatgaagatgaagaaaactatattatccactctaagttatgtcattttgtgaataagcttttccacttaccgtttttaaatcagctactattcatatgttccttgttcacatgagtaaatttccctgtgtcattaaatagaatatcctacagaaagacaggccatctagacaggtgagtcacattaggaagcaactagaaggtgcaattcagtggttcggattttgccatgcctagaagtatgacagcccatatatatgtatgtgtgtgtgtgtgtgtgtgtgtgtgtatatatatatatatataactttacatatatatatataaaacgttatatatgtatatatctttcattgtgaatttaaataaaaacaaacttatctgcatatataaaagatttcacttttatttacaaaaatcttggagacacaacccctcacacacaatgacacaatgtatagctcttaattacaccctcgcctcccctttcttatccaggaacacaaacatttctattcaaaattgtatttaagcttgcaatatgcacaattaggtaagaagtgatataaaaggcacccagtttggaaagaaacaattaaaaatatgtctctgcgaatgaaatatcttacatatagaaaatcataaggattccaccaaaataaaaaaacgcaagtagaatgaataaagaaatttagcaaggttgcagaacacaagatcaatatataaaaattaactgtgtttctatacattagcaatgaaaaatctgaaaatgaagttaagaaatcaatttcatttacaatacaatcaaaatgaataaaatattttaaactactttttacaaaagaattacaaagcttatgctctaaaaacaaaagtgttgaaataaatttgaaaaacctaagtattaataaatggaaaatggccaacgcccatgaattggacaatttaatattgtgaagatggtcatatttcccaaactgttctacagagtcgatgcagtctttatcaacatttcagctggcttcttggcaggaattgaccagctgattataaaatttacatagaaatccaagggactcagaacagccacacaatcttgtaaaaggagaaaaaagttggaggaatcacactttccaatgttaaagcttactaaaaagctacagcaattaagtcagtgtagcactggcataaagataaacatatagatcaatggaatagaattgagaattcagaaataaactctcacatttagagttggttgatttttgacaatagtgccaaggccattgaataggggaaataatagtattttaaagaaatggtgctgggacagctggatgtccacacacaattgaatacagctggaactctgtttcatatcacatacaaaaaataactcaatatgtatcaaaaccctaaaggtaaaagttacaactctcttagaagaaaacatagacatagtctttgggactggattaagcaaatggtttcttatatataacacctaaagtataagcaacaaataaaaaaattgataaattggatttcataaaaattaacaacttttgtatttcaaagagcaccagtgagaaagtaaaaaaaaaatctatagaatgagataaaatatttgccaattatatatctgataagtgacttgtttcttgaatatataacttaacacttacaactcaagaacaacaaaaaatccagacaacccaatttaaaacaaaactatctgaatagatatttctcaaagatatataaatggccaataagcacatggaagtaagctaatattattaatcattagtaatacataaagccttaataaaataccattttaggcccactagagcagctataataagaaaaaaagaaagaaagaaaacaaacaagaaaaaaaaaaaaaaagaaagaacgagaaaaaagaagataactagggagcaaggcaaggatgtctctttgtaccactacttttcaacgctgtactaaacagcctggctaatgcattaagacaagaaaaaaagcaaactgattaagaagaaagaaaccaaactgtctttgttcacatatcacatttgatataatcatctatgtagaaaatatgaaataaatgaccaaaaaatccttcctggactaataagcaattatagcaaggttgcaggatacaaagttagtatataaaagtcaatcactttcatatatgcccccaagaaatatgtggagactgaaattaaaaacacagtaccattgatattagcactcccaaaatgagatacttagatataaatctaacaaagtatgtgcaagattaatataagaaaaactgtaaaactgatgaacaaaatgaaagatgaaccaactaaatgaagaggtgttccatgttcacaaacaggaagactcaatattgtcaagatttcagttcttctgaactttagctctagattcaatggaattccaattaaaatccctgaaagctatgaaagttattttgtggatatcgagacactgattctaaagtttatgtggacaggaaaaagacccagaataaccaacacaatattggagtaaaataataaagttggagaactgacagtacctggcttcaagaattactataaagctacactaatcaagacagcatgtattattggccaaagaatagactccaagtaaatgggacagaatagagagcttccaaatagatctgtcttcagagagtctactgatcttttacaaaggagcaaagacaatataattaagatagtcttttcaacaaatgcaactggtacagcttgatgtccacatgaaaaagaaaaaagaaaaagaatctagacacagatcttacacttgtttaaaaaattaactcaaaatggaaaacagataaaacaaaaaattctaaatctcctggataaaaacaggagaaaatctagacaaacttaggtttggcaatgactttttaaataaaacaacaaaggcacaattcatgaaagaaagaattgatacgctggatttcattaaaattaaaaaattctgctttataaaagacactgtcaaaagaattcaaagaaaccacagactggaaaaaatatctgcaacagacatctcagttaaagggctgtcatccaaaatgtacaaagaactcctaaaattcaacaatatgaaaacaattcatttataaaagatgtcaaagaccttaatagacacctcaccaaagaagacatacagatggcaagtaagcatctgaaaagatgctccacatcatatattatcagggaaatgcaaattacaacaaggagataccactacacacctattaacctggccaaaatccagaacactgacaacaacaaatggtgacaaggatgtggagcaacaggaactctccttcattgccggtaggaatgcaaaatgatatggccaatttgaaagataggttgacagttttgtacaaaattaaacgtactcttaccttataatccaacaaatgtcctttttactatttttctaaaggagttgaaagtttatgaccatgcaaagacctgcacacagatgtttaccgcaactttattcataactacctaaattaggaagcaactaagaggttcttcagtaggtgagtggataaactgcgttacatccagacaacagaatactattcagtagtaaaaagaaatgagccacaaaaagacatgttggtaacttaaatgcatattactaagtaaaatatgaatttgaaaaggctacatattgtatgattccagctacatgacattctagaaaaggaaaaactacggaaacagaaaaaccatcagtggctattaggggttgggcgagggagaggtgaacaggcagagcaatggggcttacaggatagttgaactactctgtataatactagcgtggtggctctatctcattacacatttgtctaaaactatgaaatgtacaaaaccaagagtgaaccttattgtgaactacacagtctgccagtgatgatgtgtcattgtaggttcctcagctgtaacaatggcccactccggtgggggtggtgatgatggggaggctctgggggagagcaggggatgtgtggggactctgtatatttctctcaattttactgtgaacctaaaactgctctaaaaataaattctattaaggcagatattaaaatatttgacaataaaaaagaaaatattaatgaaataattgttggccaggatgtgaagagatgggaatcctcagggactgcttgtgggaatgcaaaacgaggcagctgtggtggaaaactgtgtcagtttctcagaagttgatcatgagatactatatgactcagtaagtctattcctagatacatacacaggagaaatgaacacacgtccacacaaaaacgtatacacaaatgttcataacagcattattcattatagacaaaaaggaaaaatagcccaaatgttaactgatgaatggatgaataaaatgtgggtatatccacatggtgaaatatattcagccatatataaagaataaagtagtgatacattctccaacgtggatcaaccttgaaaacacactaaatgaaataagacaacaacaaaagatctcctattgtatgattccattgatatgaactgttcagaacaggcaaatctaaaaagacagaaaatagttgcttgattgcctaagattgcgaaggaaagatgagcaggaaatggggaatgactgttaataggtatgggattaacctggaggatgatggaattgttctaaaactgattgtgtagatagttgtacaactctgcaaatatacgaaaaacaaacaaggtgcacactttaaatgagtaaagtgtatggcatgtaaattatatcacaataaaactgttacaaaaagggaggagtgtgcctaatccatgaaggaggatgttaaaagatatatttggtcttcaggtgatcaaaattaatgctatgattatggacgtgtgagtgtgatttgatggttatccaaaggaactgtttgttggagacaggtggagtggtaggtgatgtgcattctcaaagaaggactttttagtagatgcaagagtagagaaggttttatctcaatttattcttcaattttttttcttttgtgaatgcaagatgctttatcaacccacatgtattccagaatgtgctcaggtctacagagtgcaatttcccatgtcactgtggcaaattcaggtgctgtgaaccattctgctttattactggagctgagtggccgtgatcaagccattgtgcaatgcacctgcccctcacccagtgcctcagggttggacatctgctttaataaccccaatttatcatgggataaaacacccactttatcatgggccctctcatcaactcacatcccctcaggtaacctgtatatttcagtagtggtcttctctgagtcatcatcagcatcaccaagtataaaggagtaacacaaagggcaggaaatctctcccagattggagagaaacccaccccttgaagaagtgctaaaacatatcctaccacataggcagttgttccctttgcccacgtgaagacagatctgatgcactttcctcagggctgaagaataaaaatttcaggttcggaaccttcaagagaaaaaggccctggctgcaggcgcagtcaagtaagaagatgagtggaagagggagctggggcggctgcggccacgctacctcagctgtaattgtgatgattctttattcttaatgctaattttgaagttttccaaggaattattttacttagtgtcaacgatacagataacactgtggataagctctttatattcgagcagagaaactggtcagtgtcctctctgggggcctattagccaggccctagcttgaatcactctggcggttgcatgctgccttcattaatgagactgacaagccgctcctgcatgtgaagaattcagcagcagaagacgcctgttgccctcatgccccagtcagttttctcccgctccaaacccatggcatcttttctcaggcaagcatcgcgcagcgtggtgttggtgatggtaaagggccatgaagctgctgagtaatctcccaaactagcagaacccctccagccaagaatggctggcaggcgggggttgccttcctaagcctgaaggacaaggcaaccagaggagagtgaggccacatggttgtccctcatgttttgacactgcaggacttgtctccaaaatctcattttctgatagtgatagggagaggaggcagggaaattctaggcagaaaagggtgcggtccctggcaagggccccaccctcaagcctggaactgctgcccacagtaagaactttacatccccattttcccactcaaatgttgccttttccaaaaccatccctggcctgccctgccccctgtcctgtacccataaaatccactgacttgactggcagagagcagagaaggggagaagaggagaagcagctggatgtcggagactgcagttcgacatgggagagaagcagcttggcttcatgggggacagcttgatggcattttttcagaaaggagtccagtcaggaacaactggactctgggggaagatgaccttcctgctccatctcctctccagctccccttcccactgagagcctctttcacatcggcaataaaatcctccgctttcaccacccttcagtttgttcctgcaacctcattcctccgggatgccggacaagaactcgggtgtgggtgcaaaagatcacactgatgcagccagccgtggtggctcacacctgtaatcccagcactttgggaggccgaggtgggcagatcacgaggtcaggagatcgagaccatcctggctaacacggtgaaaccccgtctctactaaaaatacaaaaaaattagctggggtggtggcgggcacctgtattcccagctactcaggaggctgaggcaggagaatggcgtgaacccgggaggtggagcttgcagtgagccgagatcgcgccactgcaccccagcctgggcgacagagagagattccgtctcaaaaaaaaaaaaagtcacactgatgccccactgagctgtctaacaattaagccatctgtgatgtggctggcaaagctaaaggagcgctgtaacacgtgccctctggggcttcaggggactcaggtatccccccagatgctgctgcatagctgcacggagttttgctcctgccagcactcaaaagcgctcacccacgctcctgcaccctctcacctgagtgctctctctcccacaagaggttgagagctatgggctggtaagcaaggcaccctcgtcatgaggcctgggaaggcgtcagggaaaatttcctgtttcagtaggtttctaacctaagctgacagaatccctaataaaaggcagcaaagaccacaagaatttatgtttcttagaggaaggaaggaggcatgaagaaaattctctatctcatttatgttttataacatatcatcttttaaaaaaactcttttccttctctttgtttttaactgttaagatgctaaaagggggccagcctctttcaaacccttgctaaaaggaatagaatctgagttaagagagaacaatcatctttgggacattaattaagcacccacacatgagaaagcctgtttagaaccaaggtctgcttatggcaaactcaaagcagtttgtgcccacagggcaataaagaggcgataaggaggcaattaacctctcctctagagagcaaccagggagagaatggagcaaccagggagagaacggaggaccgagacctgtgtaaaggacccatctcagccatgagtaaaagttgatctctcctcaacaagatctttctcccgttacatagatactaatttctattctaccagacttcacaatgcgtgaccctctctcacactgtgacccaaaggtgtcattcccctgcatgtggaaggtctttcacgctctcacttgtcaccagcaggtgccttcttcaaaagggtttctcaccattcaaactgggtaatagaggcaaaataatgtattcaaggccagtcagaagaattaagcctcaaactcatttataacattctcattctagattttgatgttcttatgagtttagcacacaacttatatctaagtggttgaaggaatttttatttactttatgctctaatagagtattaaaatacttgtaaaaaatataaaagcaagaccgagtgtggtggctcacacccgtaatcccaataatttgggaagttgaggctggaagagttggagaccagcctgagcaacacagagagactctgtcgctacataaaaattaaaaaattaatcaggcatagtggcgcatgcctgtagtcccagttacttacgaggctgaggtaggaggattgtttgagccatggttgcgccactgcactccagcctgggtgagagagtgagactctgtctcaaaaaataaaaaagcaaaagttgacaggtgcactactttcttaaggaaaaacctggttgatatgctgctcagactggaaaaagtagatgatttagagtcacaaaacctaatatcaagaccaaatcctgctacctatcaaatgtatgacttttcgtaacttaaataacttctctgaacctcaattttctcatttttaaagttgggatgacaccatctcagactgtgagaataaaatgagaagtttgtaaaagacatttgcaaaccataactcatgcattcaatttgcttattactacagcccagtatttccaattcttctcactccatctttagaaagcagaatgtgctgtcattcagagtgatactgatgctgactcatgggtcaggttcagctatccttgtgtacatacaaagcaggtctcagagggaccttgggcaagggaccttgggaaagtggctctgagtgagttttgccctctgtgaaatgatgggattgcattgcatcatatcaaagctccctttcagttttaatattctatacctctagctactattaacaggtacgtcataattttgcctccccgagatgtccctttctgaatatttgtctccaactttatacttgtattgacccttttagtattagcacagacatttgttacacaccaaaaatacaatattgtttatgttaaaaaatcccttttgcaaataaagatgagcagttctaggctacacgataatcgctgatgaactgagagattaaaactaaagaacttgacatacctctccttaattaatttataatgcttaataccaataacaataataaagttagctcctgctatactagtggctattataaatatatatgctagacactgtattcagattatttgcatgaattctctcaacatctttgagataggcaactttatttccattttataggttagtaaattgagcctcagaaaggtcgtgtgtcccagcaaatatagtaagtgggagagctagttttgctataaaactcatgcttcacccctaattcatattacatcatatgattctaatataaagcagaatatattaattggcacattagcgtattaagccatttccacagaggacacagatactaaatctaaattaaattcctttgttggcttttatggagtttaatatatatttttctacctcaataggacaaaaggttcctaatcctgttatgaaaataaatattataattataaaaccaatggattcattagcttaacaaatatttctagagtgcccaggatgtgctgaatatcatctatacacaaagaattaatcagcagtgaaaaatggacaaaaatctttgttcttgtggagctttgctttctatatgcgtttgttcaaaaaccaaccaacagacagacaaataaataactttgcggtcactgttgtaagatgatcaatgtctcttctgggttgattttcttcacttgaatttcctatttgtcttaaagctatattttaaaaaacagtttgggctcaatattggtacagctattagatatttaaaagtcagcatctcttctgtacccactaaaagctcttttattaatccaccttcacctaaatactaaattacctgcagaatgattgtgtttatgtagagcttattttaaatttgatatcaggactgatgcctaaacctgattaaattatgtattgtcaatgtaacttttaaatggctatctttggatttgatttgctctaaaaagtactcctaatcaagctttttcttgccctgtcatctccatgccaatagtctattgcaatagacaagcactggattttccctttccgtttttgtggtcattggaatagcttttcagtgtgtctgtatgatgtcagtcttagttgaattcagaatacatatgacatttctcccttgcttcttcaagagacctaaaaatgttgagagatttgctttggctccctgagttctttggaaattaatcagaacacttctttatcaagttttgaagtctgtagcctacattttctttggtgctatcatttttcatgacacaccgggtcacgacatcccagtctggagccaccacttcctgtggggcaagtttctcttagacaagctgcaaaaaaccacaaaggagaagacacatgttttaaaatgaaatgtagcaatcatcctctttgggaaggaaacagtaattacatgtttgaaggagttataattggattttatgtctccctttttttgatagttattcaagctatggagttaacacactccccccatcttttattcagtcagtttgagaaaaggaagaaagatttatttgtaattatcagaaataaacacagttcctgagaagtaaacacaaaggagtagaacctggcttgaatcccacctcgttaaagatgcaaattagaaacaggtcatcgaaatgggaggtttcactaatcctttctcaacaatgtaaatcactaaattagcccccagttcaatggcatctgcagtgtgtaacttcgggtttaatacaagggatcccaaaaggaacaacaacgtcctttgggcctctattattgttctggtggcatttattttgagttgtggggcatgaggcatgttcacttaatgcctgctcccacctgctgtcattgcattgtctgcctcacctatagagctgtccattccttaattctagtccatctgtgatctctctccaaaccttctgatctatttccagttgatcagcatcaggctgtccttcaggtgctggccccaagttccccgaagcagatgtgtgcagatcatcaattctaactcagactgtgcaacttgcctttgggggacatgacaatcccaaatacaacaacatgaaaatgaggacagaaaccacagtgccttgcctcggaaaatggagttttaacaataatcttctaggctttctcagtcataattggctaaatccacgaaggtctgatctgtcctgtcctcaagaactaccaaggaagatggagaactcactgcagtctacagaaactgactgtatattaacttgcaaataatggaatctgattgattcaattgaagaaatgcttttctactcttcaaatcccttcttctcatgtaaagtccttccaaaacatcgtgcctcttatgcaaatagtttcagtttatggccagcacatgggttctctggaaccaaagtatcaatgacctctcattagtccaatttctttactgctcaaaacacttctataggagcatctcctattcccattccccagtgtcctgagaaggttccttaagctgtccattgaccctaggtttctaggactgtcaaaactttatatttgtttttccacgtgttctattctcccacattgatgtttcgaatgccctattctggacacatcacccacagatcccccaggagtgtttttgtcccactcacaccccattttcagtgtaaacactccttcttgatggatatcaaagagaaaaggccgtggcacagaaaaccagacctataagcagaatgtctggctgctgtgctggaagatagacaccccttctggacatcagagatatttttatgctactcagctgccccctgagatatttctagctagctgaagtcacacaatattgtagggtcatttggcagagactataactagttctattttaaataagatctataaatgtaggcacttgacaaacactgaataataacaggaagaaagacaattccctcaggaaatcgtgttactctctcatatgtattacggttaggaatttttccactcaccaggggaccaaatttttcttgatttagctttatcctattaaggtcagttttgccgtattatgttgttttgaatatgttgatatattctgttgatttgaatgctctgctcaagacttggacttctatttctcaatctatggagttcatataaactgctctgccttaagctacatatatatatatatatatatatatatatatatatatatatatatatatatatatatatatttaatctgtatagcaagaagtgctgtagcattgatttgcaatttaagatccttaacataaatccgatcttcttctgcaaaacttaaaacacagcctttcctcagcatagaaaattattttttaaaatatctttctattatattcttttcttttttaatccctcaaatactcagagaattaaaagcagaacttgtatttaaatgagcttcttccatcttaatttcaccatctgaggtcatatcatagcattttccatctgaaagcaactctcctgtttgtcacaaaatcaactcccaaattgaagtactaagtaacaagtatttagaaagtgatttgattcttgtaatatctccagtctaatttgcatcagtcactttactttctttctttctgcaactgcttccatactcactgaaaagtagaggggtagacttttttagagctaaatgtttggtataaaacagatattccactaatttgctttgcaaattgggctctctgtgatttactatagaatgcactccaggagacttaaaaaatctagggataacttgctttgccattcacacaaaggcacttaatcattctggatgttgctgcttctatccgggaaatgacgattctatcacctatttctttagcagaagggacatttgctaggattcctgcaaaagccctttttggataacaaaacatgtacattaataataattccggcttttctgtttaggaatcatggttttttttttttatgattcttgccgaaaattaaacttaaaaacaaacaaaaaacccacattcccctgtgtagtcaaaacacaacatattcttcgcaaagaaaaagaagttgaatggatgagcatatttttcatcactcatgctctttgaaccggcagtaaatgacaaacatgaggagaaacaagagcactaaactggtacccgtaatctagtcctgaccgacactagcttgagacattgagtgtgaccttgggaaatcaaagagctttcctgggcctcagttatccaatctgaaatccaggatattggatgtggtggttgccaagacctctccaattaaaggctgtaatttagaaattgtcttttttaacctttttcaaggaatgatagtatattcaatgcagcctggaaataatgatggtatcactgtttttgatggaattggtactggataaccttacattaagtagaaccaggctgcattttcagcaagagagcatattatctaatagatacaaaatataaaaatagattgggaggccgaggcgggtggatcatgaggtcaggagatcgagaccatcctggctaacaaggtgaaaccccgtctctactaaaaaaaaaaaatacaaaaaattagccgggcgcggtggcgggcgcctgtagtcccagctactcgggaggctgaggcaggagaatggcgtgaacccgggaagcggagcttgcagtgagccgagattgcgccactgcagtccgcagtccggcctgggcgacagagcgagactccgtctcaaaaaaaaaaaaaaaaaaaaaaaaaaaatagaaaagctcctttttgtgtatttgagaaacaaattgttagtaaaatgagctgactgtgctctttgagcccctgagctgcctgccctgaggattacgtgtgacatgtaacaaatcccgggaatgctgtttcagtctgtgaggcagggctccataattatttttaatacatttctaggcttgttttcagaatatacaaagaaaacattcaataatgtcatctaaattgtgaagggcaattagattgttacattgggattttcactggattatgtggtgaggtttcctcacttggaataaggccctcctttgttttctcattgatttaaaatgacaagtttataaagagcaaaaatgtttggatgactgacagttcaaattttgtggtaaagagtaatggttttgttctgaggaatagggcaaagactctctccgtgtattgacaaaattgtgattctagaagccacaccaatcccattcccagctaagggtattagaaaagaaaaatgcctgcaaccttatccactggttcaaaagtagactgtgtcacagatagcttagaaaaacatttgtttagctgtatttttgactgagatggctcaatgtcataaattgatatttaacatctctggaaggtagagacgaggtgtcatgaggcaggaagagcagtactgcacagaatttgataacagagtctgtggagtcaaaacactggcattccaactcagccctgccatttacttacctgtgagatcttatccaagtagctgaaccttaagaggatctttatctcatgaaataagctttgtaaaatacatcaatggaaagaatggggcagatgcattttgccacatgaaatatacctttataccttctttaaaaagaagttaacaaagaattaaaatttgccttggaccataagtaatcatttataggaaaaaaactatgggagtgctcatatctaatgctgagagaaaatgacttactttatgtatgtaaacagaagcaacattctaaacaagtttcgtggaccttctatgtgacagtactggatcacactggcccaaggctaagaacatgaatcaaaatataggtttagatttcacttagatcaggttctttgtctttttcttttcttttttggcagcgtcttactatgttgcccaggttggcctcaaactcctgggttcaagtggtcctcccacctcagtctcacaaagagctggggttacaggagcccatcaccatgcctggccaagccaggttcttaaacttaacgtgcatccgagtcatctggaagacctattaaaacaagattactgggtttcattctagagcttttgaatcagtatagctgaagtggggccagagttagaaagtacatctctaacaagattagataatgcttatgctgctggtatggtgagcacactttgaagaccacaatgcattatcatctccgagtgcctatttgtataataaaatcactactggagtgtgtcaaaggaaagctgagagagttcactgcatgaagtgactggcatatttctttctctctgagtaccagtcttaagacagaggaagagaaatggaatggttaacgtaccaaaccattcttttttccttccactggttatgaatacatctattcagtcattcattcaaacatgggatgtttgagtgtgtacgtgtgtgtgctcatgcgtgtgtgcctgcacaggcatagcagtagattctgggttacagcataaaaggagagaaaccaagattatagcattggggttaataaagcctaagaaagaggcaggaactcattgctcacctcaagccttacccagcaggatttcggactattctgtatgtgttaggtggaaagcagctttcagtttaaaaggaaatatcataagaaattaagagattccatatagaaaagtgcaattgtataaagaaaacatgcaaaataggctttacgaaacctttcaggttgactcattctctcatcagaccactaataagacctaacattgatcttgctcttgcatagaaggcacatagaaggtggaagatgctgttctacacatattagtcattttagccccatgacaaccctatgaagtaggtgctaacatagaccccacttaaatataaggaaacggagccacagataatttctcctttgttcttaagattgctttatatattagataatgtatacttgaaaaacatttgactatgtgaattgtgagtgaatggatgcattcaatggcaagaagatatttttgctcactgttgatacctcctgacctcccattgcatggctattcacggtcaaaacagctagtgagcctcctgacagctctctgaactaggtgaagactaggttaaagccattgcagaaaaataatggtctcttggttttcacaagattgtccaagtccttatttgcaattgtgtcaacttctgtgttatttctcctaccaactaactccatttccttcccagtagggtagcctctgcagtgtcatagggcttatatgtcatgcatttttaaaatgtaggataaaagatgttgagtgtcagctacatgtggagtgttggcctggaccatccagtgacagcacctggtgtactcccatgggtagtttcaagaattctgtgccaacaactcaaattttttcatcctgttagcaaattggatgctattaaatggagaacaaaaaggcctatgtccatccagtttcattaccaagtctgatgaacatctgattattgtcatgatttaaatgttcatctactcagcatgagaaggaaacagcatttgaaaccatgtctcttctttttccagaaatccatttttatgcttgtgaccagcttagggtactatttcacagaggggacttagaagtctaagctccagttgacagtatcgacagatttgagggtgttgattaagggacttgatatggcaaaataccctcctggttgcaacctagtgtttgtagaatcataagcttgcagaacacgtgcttcaatcagctggctgtgtaagaattcaatcagcgttaatctaacacaatgcagcacctgctccccgactgatttctagtgttcttcaatcaaaagcagcagaagaaaagcatcatttatcgtaagcaatgttagcagacctgaaaattcaagaacctgaagttcaataggaagatcaggtttgccttttgcttctcttcctgtcattggtgatgctacaggaaaaaaaaaaaaaatgagctgttgttcacaaagaaagtgggagaaggttggtgtgtccagcactaaattcactccatataaaatgagtgctgtaattaggtgctggtaattaacactcgttgccatgcagctcatgcatctataggatcaggcatcttttgggacttggcagttttcctctaagctacagcactaaacagagaggacagatgacattagtaagctgtattaaagagaacctgactatattgctccatattcagtcttagatccaaagccagcttgccactttggtggaaaattgataaatcaatcacttgctggaaaattaataaatcacccaggggaggtgctttcactgcaatagaaaataaaccacagaaacattttcccttcaaaatgttgagcttccggaggcaggaactagtaaatcctgttcacaatttcatcccacgtggttagaatggtgtctggttataataggtgctccatgaatgtttactgaataataattaaacaaagcaaacatcaccaacatttatgtgcaaagatgttccctaccactcaagttcatgccaaaataaaaattaaaatgtccattggtccttgtattgaaattgatcatgaaccaccttttcccactggctttaacaattcctctaaatggaaatagcacaattttcctaaagcagacacttattaagaatggaaatcatgctttgcaattcaaactcccaacttcatagtacaatgcacagtatttgacttgagatagaaaatgtgtgacttacaagtaaaggagaacttggtatcattggagaatatgtcctcagttcctggctctttgcccagaaggattattttagagcaggttgaattctctactaattatcttcaaaacagctggactactggataaactctatcttaatgcacagtacaagagcaaataaggataattaaactttgatttcagacgagactgacaaggggagtgagtggaagactgtgctctaagattgaaggcagaggagacagcatagttgttacctcataaaaccccccttcaggaccaaaaagtatgacctattgttaatacattgcagctaactttgatgaatgcctaccttagcctgattattttatttgctttgggaaacacctaatcaattccactggggccctaagtgatttcaaacaaattgtacaaacaaccccttgatttcatcagaaacatgcagctaacagaattagcacctaaacttcctgtgggcaaaggtaataacattctccaaatgaagaatatattaaaaaaggaaaattcagcttaaggatgatgaagccatacttcatggtaagtgttctgaagcattcttgccaaatgagaaatctgtaaattacctgggtaagcaatcagctccagattataattgccaatttgagaaaattttaccaacaattaagcaaaatcaaataacccatttgaagaagtggagtggtataggccaccaccttttccttcttgttaaggtttgctataattggttttcattttcctttagaaattgaaattcctttctcttttattgggctagaaataatcaagggccaccacggagaggtccagacacatctggacacgagtctctgagtgatttggtttcagtatgaaaataggagttatgtgacccagtaataagaatcttaaactcaaatgacaaagaaacacgtgacctatttttctagtttattataccagattggttccagaaattagaatacaaaccacactctctgcaggatgactgagagaggctctgatttcatgttcttcctaaaacctctcacagttctgccatatctagctatgaatcttggtgaaatcatttaaactcttcagagctttcttctcctagaaaaagagtttcgttctgtgaaatcaatgtcttttttttttttttttttttttttttttttttttttttaagacggaatcttcctctatcatcaggctggagtgcagtggcgcgatcttggctcactgcaatctccgcctccggggttcaagcgattcccctgcctcagcctcccaaatagctgggactactggtgcgtgccaccacgcccggctaattttttgtgttttagtagaggtgaggtttcaccatgttggccaggatgctcttgatttcctgacctcgtgatctgcccatctcggcctcccaaagtgctgggattataggcgtgagccaccgtgcctggccaagtcaatgtctttctctataaatgtttgatgagtgcttactatgtgccagctattgtgcacagtaaagaagatataaaaaatgaacaacaactttgtgctacatgctgccagttgcttcctatcttcatgctccccttctttcttctaagagaacctcagagctgttgaaggtggtgactgcatagataaaacacatctttctagactttcttgcagccagaggtgaccacgtgcctcaattctgtccaataagaagaagatgggtatctgcccaaggatcccaggactttggagtttacagatacctatgctgcaattctccccttccttccttagttttgttctggtctgtggtgacaaaggaaggaacaagcattttgagaccaggaaatggcaagacttagaaactatagactacgtatgatagagagaaaggaaagatgatacctgcgacattaatggcataaaaaattattgcctagctctgaaatgcataccttcaaagatctttgttgagaagaacggactcctactgggttcaaacacagcatgtgcgttttatcacttgcagccaaatacaacctcagctgatgcaatgcttccgtgcccttgagacacttagggggattataggcacatatgcaaattaattaaaaggatatgtggtaaaggttatgaaaaatacggagagagagtgagagactgttcattggaagcacggccccttagaactttgcctgtccattttgggagttggagtcaagtaaatgttcctgaaatacgatatgctgcataatccttgaatgatgggtactgttagtctagggggaaaggcagtgatggtatggtgtattctaggccaaataaaagcacaatggaagccatggaagtgcgggaggcaggagcagtattatggcaatgtgcaattcaaagtgagccctgggcaaggaggtgaagggctgagcatgagagcttatataacacattaaggagcttaacaatccatcttcaaaggagacagatgctgaggggtttcatgaccaggctgaataacttcactagtctgtgctaggcttagttgatacatagaaaaacaagcttagtagacctgtgtgcactgtatatttatgtaatgacacaaaagatgagggcagccagcaggacctgaacttggagatctcactagacacatctattggcgatttcttcttcctgacacccactacaatgacagtaaaggggaaaataaaaggaatcatcacataacatcaaagagcacaggtgagggaggatcagcagacaaggactttcaagaaaatcctagaagtatggagaaagatgaacaagacacaaggaagccactcctcaggagagtgctctagcacaagtgtgaacttgtcagacagaattcggagtggcttggaattgaaggcagaggtatggagggcagaaatgagcagtggggccaacaacagaggatgaaatggcaactgcacccacaagtcagttcttcctccagcccttcctgcacatctctttgcacacaaaacacagacagcccactattaacccaggcaaatagaacaaatggtttcttttaaaaataaataaataaataaataagctgccaaggaatttgccccagtttagcatttgagaatgcccgaccctaaagtttatttccatgtctgtgttaagaaatgtgccacctgcccataaatgagcttaatcacataagcacctagatgctttagcatttatgggagaaactcagtaggaagaaggatctacatttacaacatcacagaaagcccaccctagctatgatgaaatcctattccagtgcctcacaaatatatatgacaatcacaaaataaaactagtaaattttttagaaggctaagataaacaaagaaaactggtctcagaagaaacagggaacaggagaaagtattttttaagcacctctaattggtattcttagagatttaagatgatactataccaataagataaataaatagatactatgtagaagtaattgtcagggaaaaataacaagcccatggaattaaaaataatattgttgtattaaaataaaattaataggctacccagtaaagcagaggaaatctctcagaactggagcaagaagaccatgatggaaagtatgtgtgaggaagcactgctcgtatcagataggaactattgtatcacatacaacaaaacttatgcagagacacacacacacacagacacacatgaagatgtagtcaacccaaaaagtccaacgctgacccataaaacctgcagaattagagaatggagaaagtagagaagaaattacttaggaaatagaagaaaatgttaccaacaaattataggctgaataccaaacaggattaatgaaaaatgattcatatacagatacatcactgtgaaatttccaaacactaagaataaagcaacatcgtgaacacttctaaacaaaaataaatatatttccatgctcatatgtataggtcctatataaaggattagtcatcaggactgacaacagttgtcttatttttgaatcatggatgaaaaaagcaaaatgtggcaaaactattttaaaatgaaaatttccccgtttcattgaggtataattgacaaagaaaaattgtgcatatttaagatgcacaacatgatgttttgatatatgtatacattatgaaatgattgccacagtcatgttaattaacatatccatcacctcacataattaccttctttttttctggatatgggaagagcatttaagagatcttctagcaaatttcaagtatgcgatacactattattaactacagtcacagtgctgtacattaggtttacagaacttagtcatcctgcataaccaaaatgttgtatcatttgacaaacatctccctgcttccctcctcctccagtccctgacaatcaccattcgacactctctttctgtgaatttaaatttttttagattctacatataagtgagatcatgcaaaattttgtcttcctatgcccgctttgttttacttggaataatgccctccaggtccatccatgttgtcacagcctttattatggctgaataatattccattgtatatttttatatagaacacgttctttatccattcacccatcagtggatgcttatgtggattccatatcttggctattgtgcacagtgttgcagtgaacatggcagtgcatatatctcttcacaatactgatttcattttgtttttttcttgagacaaggcctctctctctgttgcccaggctggagtgcagtggtgtaatcatggcttactgcagccttgtcctccggggctcaagtaatcctctcaccttagcctccttgaatagcaggggaccacaggcatgcattaccacaccaggttaattttgtattttattttatattaatttattttattttattttctatttatttatttatttatttatttatttatttatttatttatttatttattgtagagatgggatctcttcttgttgccctgggcccaagtaatccttctgtatcagcctcccgaagtgctgggattacagatgtgggctaccacacccagccctgatttcaatttttgagggggcatatacccagaagtaagattgctggatcatttgatagttctctttttaattttttgaggaacttccatactgtttccacaatggctataccaattcaaatttccaccaacagtgtaccagggttcccttttctccgcatcctctccaacactgatcttttgtcatgctgacaactggcattctaatagctgtgagattatgtatgtttgtggttttgatttgtatttccctgatgattagtgatgttgagtttttttaaatatacctgttggtcaactgtatgtcttattttgaaaaatgtccgttcaggtcctttgcccatttttaataaggttttattttcttgtcattaagttgagtttgtatatatttcggatattaatgccttctcagatatatggtttgcaaatattttctcccattctttaggctgtctcttcactctgttgattattttatttgctgtatatgtcttttagtttgatgcaattccatttgttcatttttgtttttattgcctatgcttttgggatcatatccaaaaatcattgcccagaccaatttcaagaatctttttgatggttttcttcttgtagttttacagtttcaggtcttatgtttaagtctttaatcaatttttagatgattttcatatatatatagttgggtccaagttcattcttctgcatgtgaatatccaattttttcaataaattttagaattgttctttatatttctctgaaaaaaaatgccattgatattttgataaagattgcattgaaattgtaaatcgctttgggtattgcagacattttaacaatattaatttttccaattcaggaacatgagatatctttccatttattcttgtcatctttaatttttttcatcaatctcttatagttttcagtgtacaagtcttttacctcctggttaaatttattcctaaggtttttttaatgctattgtaaatgggactgttgtttcaacttctttttgataggttcttattagtgtatgaaaatgcaactgatatttgtatgttgattttttatccagtaactttactgaatttattagttctagcagtttgttggtggaggctttggcattttctatatttaagattatgtcatctgcaaacggagacaattttacttcttcttttccaatttgaaactcttttatttcttttcttgtctaattgttcaggctaagactttcaacactttgttagataaaagagatagatggacatctttgtcttgttcctcttcttagaagataagctttcatctctttactatagaatatgatgttagctgtggacttgtcatatatggactttataatattgaggcacattcgttctataaataacttgctcagagggtttatcataaaacaatgttgaattttgtcaccttttttctgaatctgttgatacgatcatataacttctatctttcattctgttaacgtagtgcaccataattattaatttgcatatgttgaaccatccttgcatgttaggaataaatcccacttaagttatgatgtgtgactcttttaatgtgctataaattcagttggctaatattttgttaaggatttatgcatttatatttatcaggaatattggcctatctttttcttttcttgtagtatccttgtctggctttggtatctggggaatactggtctcataaaactagtttggaattattcccttcttttaaattctttaagaaaaatttgaggattgacattaattatttagacatttagtataattcaccagtgaagccatcagatcttgggcttttcttttttgggagttatttaatttctgattcaatccttgtaattggcctattcagattttctatttcttcatgattcattcttgataaattgttcttggttattcagttcattggtgtataattgttcatagtagtctcttatgatcttttgtgtttctgtaaactgtattgtgtactctttgatttataaatttttttatttcagtcttctcttttttttcttagtctagctaaaggttagtcactcttgtttgtccttttaaaaaacaactctgttttaaattgtttattgttttcagtctttatttatttctgttctaatcttcattaattactttcttctgctaattttgggctttgtttgatctttttttctagtacctataggcataaagctaggtgcttatctgagatttttttccctctaatataggtgtttgttgctataatatctccacttgaagctgtttttgctgcatcccttaagttttggtatgttgtgctttcatttttgtttgtctcagatttttaaaaaatatccttttgatttcttctttgacccctcgtggttcagtaatgtgttgtaaaatttccaaatatttgtgagttttccaatattcctcctattatcaatctctagttttgcaccattgtggtcagaagaggaacttgatagaattttaaacttcttaaatttgttaagacttattttgtggttgaacatataatctgtcgtggggaatattccatgtgtgcttggaaacagtgtgcgttctgctgctgatggatgaaatgttctgtatgtgtctgttaggtctattttggcttacagcgttgttaaagtgcatatttccttattgaaattctgtctggatgatctatctatcgttgaaaataatgtattcaagtcccttactattactgtattgttatctattttgctctttcattctgctaatgtttgctttacatatttaggttcccctgtattgagtgcctatatatttacaattgttgtatcttcttgatgaactgaactctttattgtcattatatagtgaccatttttgtattagtctgttctcacactgctaataaagacatacccaagactgggtaatgtataaaggaaagaggtttaatggactcatagttcagcatagctggggaagccttacaatcatggtggaagacaaaggagaagcaaaggcacatcttacatgttggcaggcaagagagctagtgcaggagaactctggtttataaaaccatcagatctcatgagacttattcacagtatgggggaaattgaccccatgattcaattatctctgcctggccccacccttgacacatgggacttattgcaattcaaggtgagatttcagtgtagaggcacagccaaaccatatcaatgaccatttttgtctcttatgacaggcttttacttaaagtctatttctgttggttaaagtatagccacacctgcttccttttgattcccatttatacaaaatatctttgcctatcctttcactttcagcctatgtttgtctttaatctaaagtgaggtccttgttgacagcaaatagttggaccagttttttgtgtttatgctctcagccactctatgtcttttgattggagaatttaatccatttaaatttaatgtacttatttataatgcataattttctggtgtcattttgttgttttccaactactttgtggtttcttttttcctttcttcctcccttgctgcctttctttgcaatttgatgattgtgtgtgtgtgtgtgtgtgtgtgtgtgtgtgtggtggtggtgggcgtgtgctttccttttttttttatcttttgtgtatctactataggtgtttttgtgattagcatagggcttacatcaaaacatcttgtagttataaccgtctactttaagctgataaatcttaatttcaaccacatacgaaattctacactttaacttcttccctacattttgtgttgatatcacaatttacgtattttatagtttgtgttcatcaggaaattattatggctataattatttttaataatcttgtctctgaactattatactagagttaaaagttatttacacaccactcttctgtattagagtatcctgaatttgaatatgttcttacctttagagtgacttttacattgcacatattttcttgctgtaagttagtgttctctcattccaacttgaaaaactccatttggcatttattgtaaggcaggtctagtggtgatgaactccctcagttttttgtttgtctaggaaaatctccttcatttctgaaagacaatttttctggtataatattcttgtttaacgcttctttcccccagcactttgactatatcaccccattctttcctggctgcaaatctgcttagaaatctgctgatagttttatgggagttgggggagggtttccattgtatgtaaccagtcacttttctcttgctgcatttaacgttctttctttgtctttgacttttgagaatttgattataatgtgtcaaagtgaagatcttttatgtttagtctatttggagttctttcatcttcatggatatggatattcattttcctctccagatttgggaagttttttgtcatttttcccttaagcaagtttatttcccctttctctttctttgctccttctggaacacctataatgctacatattggctcactcgatggtgtcccataagtcccgtaggctttttcactctttttttttctttttgttcctctacttcaaatgacatgactttgatcttgctgattatttcttctgcttgattgagtctactgtcaatgctttatatgaaattcttcatttcagtcattgtcttccacagaagcaggatttctgtttggttctttctttaatggctctcatctttttgttaaacttgtaattttgttcatgtagtgttttcctaattttgtttggttctctatctgttttgtcttctagataactgagctctttaaagacaattattttaaattttttcaggcagttcctatatttccatttcattaggctaggttacactcctgcattgcttgacaacaaagatatgtcctgagaagtgtgttgttaggtgattttgttgtgcaaacattatagagtatactcacacaagcctaggtagtatagcctactatacaactaagctatatggtatatagtctattgctcctaggctataggcatgttgttattttgtatactgtaggcaattgtaacacaagggtaagtattcatgtatctaaatatatctaaacattaaaaaggtacagtaaaaatatggtattataatcttgtgggaccacctttgcatatatgggccatgattgaccaaaatgttgctgtccagtgtatgactatactggtactttattttgtgcctttggtggcaccatgcttccctgatatttgcaatccttgttgcctgtacaagaagtacacatctcttccggtctgtatagactgtctttgccagggaagtcatttcccactcagtctgtccagagattctggtgggctggttggtagggtctaccagtaggcttgctgttagagttcttgggtggaatgatccggtgcatatgtcagtgagcaagcaggcctagagagactgatctaaagagactgacctggcacctggtctgcagagagcatacctggagcctgtgtccactgagggcaggactggaacttgggtccatgtgagtaggcctgaaatctgggtccacaggggtgggcctaaagcctgggtcttcaggggctgtcctggtgttagggcaggcctcagcctgagtccatgaatctagcctggtgctgaggcaggcctggcatctggatttgcaaggatgggccttgttctgattctatgaaggtgacttggtactggggtccacggaagtagacctggtggctgagaccatggtggatgacttggaacctggatttgcagcagtaggcctgggacctgagttttttgtttggttggtttttttgcagtctacttggaaaggcctgtgtcctgtgtctgttggagtttgaagccacatggactagtgtagtcctggagaaaacctagagcctgagtccacaggagccagtttagtgcttgtgtctacaggaacctaaaactaaattactatatgcaattaaaagggccaaaaacaaaaaagtatcaaatgggcaagcaaggattcagaacatttctctctctcatattttttctgaagaagttacctgagaatgtaccaaagaaaaattagggttaaaacaaagaaggtctacctacatttaaataagagtgaaaacaaagaggatgatattggataaaagaaattatgggatgaaaccagtttgtaaagaagtttaaagccagtagcagtaaggcaggtctagaaagcaagtagtttaggtgagaactagaagccagtgggcactcccaaaaaatgcctttgaggggaataaattaatttcagcattggaatggaataggtaaataaatgaaagatattacagttatatgaaaatgtatacatttagtttctcagcaagaaaaaagaaatttgtttagaaactctaaaataaacaaaagtaaggtcaaaatatggagcaaagtgaaatgtagaataagtttgagcaatggatgaacagtaggaaaaacaattcatatcatctagatggtaagactgtttttaattcaagtattcaagaaactgtcaccctaagccattgagaaatagtcattctacagaaaataccatttacaaagctgtaatgtaaatgctttttattggctttaagcctttataattgacttagagactaaataataaagtaaaacatggttacaaaacagaaggttaacatcagtggaagttaatgtttaaccaatggaggttgggagatggaagagtgaagtatgcaaacaaggctggctcagtgctgagttccattttgtaaatgttgagtaaacagatctggctgaaagttaatcatacagaaccagcgagtgtgtatttatttattttacttggtgcaggtagtactttgattaaaaggggtgatatagtttggatatgtgtccccacccaaatatctattgaaatgtaatccccagtgttggaggtggggcctgctggcagctgattggatcatgggagtggatttctcacggatgtttcagccccatccccttggtgctgttcttgtgatggtgagtgagttctcgggagttctggtcgtttaaaagtgtgcggctggctgggcactgtggttcatgcctgtcatctgggcactttgggaggctgaggcaggcagatcacttgagctcaggagttcaagaccagtctgggcaacatggcaaaaccccatgactacaaaaaaaataacaaattcagctgggtgtggtgtcatgtgcctgtagtcccagctactaaggtggctgaggtggaaggatctcttgagcccaggaggcagagggtgcagtgagcccagatttgccactgcacaccagcctgagcaacagagccagacctggtctcaaaaaaaataaaaagtaaaaataaaaattgtacggcaattccccccgcccttgctcctgcttttgccgtgtgacatgcaagctcccacttgacctttcatcacggttgtaagtttccagaggcacccctagaagcagatgttcatgctgtacttcttctaaagcctgcagaactgtgaacctattaaatcttttttctaataaagtacccagtctcgggtatttcttttctttttcgagacagtctcactctgtcacccaggatggagtgcagtggcacaatctcggcccactgcaacctccacctcccgggttcaagtgattctcctgtcttagcctcctgagtagctgggattacaggcatgcaccaccacgcccagctaatttttgtatctttagtaaagacggggtttcaccatgttggccaggctggtctcaaactcctgacctcatgatccacacacctcggcctcccaaagtgctgggattacaggcatgagctaccgtgaccagccatcatgtatttatttatagaatgcaggaacgacctaatacaagggggagcaaagctgaatgcattgcagatacttggctagagtcaatcactacgatgcctatccagactccaagtgcttgtgtttacagggacctaaaactaaattactatatgcaattaaaagggccaaaaaagtggatcaattgtgtagacaaggactcagatcatttctctctctcatatttttctgaagaagttactttctgccaccccaacaaagctggtgaaaaactagcagaggataagaatacagggttccacgactctcagttctgattccccctaccaggcacaactgcacttccctgcttcttgtagagattttttaatgctacttccttgccttcttcctagatgttgaaatgatgttgcctgaagaaaagatgtgtttgaggagaagtgcagaagtcaaccctctgattaagaggtaaaaggtctaaacccacttagatgagtttacccaatgtagtaaaattccattatgcgagcctctcctctaaccccctactacaccacgcccctaagagcccctattttacctctgcataggttagcactcccccaccctctcagaggccactgaatgaagtaagtcaatttgaggtgtctgaccctggtaaactggtagtgtgcccacataactgaatgagttcatctaattaggggtttatttgtttgagttgtacatgaatataccaaattacattatcagatgatagtcctgtttctgatttattccttctttgttcttcaaggcttcgtacatctaagcaattaacctctcaaagagctggagaacacataattatcctcatttgtctaaacgtcgccaagatggccgcctttcaattaaccttctggggatggaagaaagttggagtgatatagtgatcatttttaaccttactgtatgcttttttaaaatgtaatttaattgaaatagccagatgataaaatagtcagatactgtttccacaggtaaaaggatcaagggggttttgaggaagaaagggctttggaaagttgacagagctaataaaatagatgatgcactgtatgagagagaagttaggcagagcaatatacggaactgtatcagtgagcttcagagccaaggcccaatagaatgccaggatgagacggcaacaaacacatatgctccagcctttcatcagctccagcagaccacaggagatccaggagtaaatgatattattgctctaagcagaaacattaaagaaaaagaaagcagctaatggttatggaatacctagtatgtgccagcactctgctaggcacttttggtccaggatcctatggaacatatttcagttatatgagaatatagcaaatgacatctgcccactgacaatgagaacaaaaatagggcatacagatgaggacttctagtatagacacattattacattatccaggcacatggctgagaaatggttcaaaggggcattgttttaaccaacatgtagaattagttcacaaaataagataaactaccctattacagccatcactagcaggccttatgggtatttcacttacatattctctgagtgtctgtgcatctttcaacttggatatgtacaaacatattgcccagtaactgatgaagactcagattgtgttcagttctgggtagcactctttaagagtaatatcaatgaacaagcatatttacagtaaacatattatagaagaaatcatgaaaaaattataaccattgagcctgaaaacagttcatttgggtcatatatgacagttctctcaaatggaaaaagagtgtgtcacataaaagcaaaagaagaattacttagaggaaatgagtaaaatcaataggtagaattttcagaatgataaaaactacaaatttatatttcaccaaaattcaactgttgagttgtgtcatgttggaatttgcctcatgttttgaagtaatattatttatagtgtgcttctgccgtggtgattatttaaagtgagtgctgaatgagtatttgtgtaagaagtactagaaaatgattcctatgctgaatggatagactgtaaaactctaggtctttctattgtacagttatgtaactataactctataacctacaatcctcacaatcacagggctaatgagtttgcctagaggaattaacattttctttttttcccaacatacatacactttctttcttctctttgtaatcccccaaatgtaagggagtaccctatttgcacagaagtgtcaagaataatggaaagaaactctcaaatgtcaataacacttccatatgtggagatctttctagttaggatgcaatttgggatggaagaacaatccttattattactttatactcagctataatcaaagggcttctatattaacaaaagaactgaaaatcagaccaagtaggtaacacaggtcaaacgccgctggatccttcttaccctattggtgtcattagagtataagtgatttactcagactctgatagaaagaaccagagagattaatatgatctttgctccttgagaaacactgaaagttcattaattggagaagggagtgaagctaagaaattttctcagtgaatcagaataaagcagttgcagatagctctaaaaatcagacacaaacaataaaatcttttctttacacatacattatggctaccagtgtcaccagatattaaacgataatgaaaaaggcttagcactttaacaaaatgatttcttgttaaagaatgctcatttcatactgagcatatttaaatggaatggccatccctcagtcccttgtctcaagttttttatttttagtctcatgggtcacggagtttcactttctttaaaagaagaaaggcaggtatttaataaacttaaagggaatttcaccagttgtcatttctcttctctggaattttctgacaagctgtgctctaacctcctgtggtgatattcatcaataatgcatagcagataacccggtgcctccacctacatttgtggaacacctttcacttgcctaatggaaacatgtcagcatactgcgtggtttgtgataaaagtgcagtctttcaagcaggcatttttttcttgttcttaaaaaaatgcccaactttttattttgaaatattttagatttatagaagagttgcaacgataatacagggtgctcctggatagctttcacttaacatctttaaaaaccatggtacaataatcaaaactaagatatgaacactggtgcaatattattagctaaactgcaaacttcattatttagatttccttagtttttccactgatttccaggactccatccaccatctcacagtgcatttagttgtcctttttcctaaatctcctccaatctgtagtagtgtcttggactttcctagtccttcatgactttgactttgaagaggagtgaccaggtattctgtagcatgcccccctggtttcggatcacttggttaaggtgttgtccaccagaatcctccaccgtaaagttacagttttgccctttccatgctctattcatgagatgatagccactaactacagcccgcactcaaagggagggagattaagctccacctccaggagagaggggcaccaaggctttatgatttgttaaaaccaacacaatgattgatacgcgtcagaggggattcgctaagaccgtgcgaatatcctgcttctctttgatttttaccccctaatttaagcattggtcagtgcctcttgcctctagcactgtcattttaaacaaaagttgactttcatgggatacatagatacatttaatattagctcagtaaagaaacaaatgtttagtgcttacaaaatatctgtaatacagttggtaatctaataaatattccccatttataatctaagtacacaagtacatcgtagtggttctccaactctggtgtacgctggcgtcatatgtggagcttctgaaaaaggcaaagacctgggccacaaatatttcagctgaacatgtatttcacgtagagcaaatttaagtggactagaatctgacgtaaatcaaagggtgagaaacagttgtctattaggaagaattcagtttttttctcagttaaaaaaaaatctatgatagaatataaaatagcatagtatgtctactttagggtttatggtattttttgggatacaagcttcttaaaagttggagtcatcccatctctcaaataatcaataagtaaagtacctatactacagtaagcatagtggcatccattataaaggagacacgatgatatgtaagacatgactgtgcccaaagttgctcatgatttggttagaaagatgaaaacaattagttgaacaattgcctattagttgtcaaatggtgagctttcatattgactttaaaagtaagtgaaggctgggcacagtggctcatgcctgtaatcccagcactttgggaggccaaggcaggtggatcatttgaggccaggactttgagaccagcttggccaacatgtatctactaaaaaatacaaaaaaaaaaaaaaaaattagccaggtgttatggtgtgtgcctgtagttccagctactcaggaggctgaggtaggaaaattgcttgaacatgggaggtggaggttgcggtgagctgagattgcaccattgcactccagcctggatgacagagacagactccaactcaaaaaagaaagaaagaaagaaaaaggaaaaaaagtgaagaatcaagaaaggagagatgagagagggtaaggggtctggagaggtttcatagggaacacacagtgaaacatggactttgcatgctgtggaggaggaaagtttaagaagaaccaagggcctgagtcaaaagctccaggctgaatgcaggagaccaacgccagtgacagagacgtggtgggtgaacgagacctgcttaggaggacagcgaaagccccaaatgccatctgaacttaatgtgggtaaaacaaaggaacatcagaggagtagcctaatgacagggatattttaaaagtaagcccttctcttactgcttttgtctcttgatgaaccttcatatggttctccgcaagcgaggacactcaattaatatcagtgatgaactgatgtgaagactaaaatgatcttggcaaatggaaaaaatggaaataacccaaaagaatgacattcaatagggcaaatgcaggcaagcgcagttaaagaacagatagaactgtccaaaatatatcacagggattgaatcctgtgtttaaggattggaacgttttccagaacttgactcaaatttaacatgagttgcgtgattttgattctcacacttgccccttgaactagttattttatgtccacttacctttgaggaaacttaggctgggcgaatattagtgtcttttccaggacaacatagctagcagttgtcagtgaggtcttttgaggtagcattcactgtgaattatcaaaccacatagaaccattgcgtgtgagtgtgtatgtatgtatatgtgtgtgtatgatattttagtatgtgtgtgtacatatacatgtgtgtggtatacatatggaaatacagtgtacacacacatatatggtgcatatgtatatatgtgtatgtgtgtaccttacatatgctatatgtgtgtacacaagcacagagatcctcccttctcttccctattccttccaatgtaattctttcttaaaataatacaacacgcgtgcaataatggtatacacaaggattaacttaaggagcaaatattcaactaaatagaaacaacagtttgcctcattttcatacgattcccctggctctcacaattggcagagcctgcatgaaagaacctggaaagcttctattgtttgtaaagtgtctacctgtcatattccctcaccctctaaagcccctgtcccatagggtggtggcaggaagccattcccagagaggaggaaggggttggtagtacagctatatctcacagaaatgtactgcagaaaatgagattggatgttgtcggcaattgatttggtagaggcgaatgagaagatgaatgtaattagcggaactgcaggctactcaggacttcagcctggttttctcaaaacccataaaatgctccacaggtgcccccaccctcccccacatcctcctcccccacaagtggtctgatgcgagcttgcccgtctctgtggagagaatgaaggtcgccacttaataaggctccccctcggtggaagagctgtcacggtggaattgtctgtatttattttaataaaagaaaggtttggttgcgatagtgtctgacaccgggcacactgtttctttctttttagccgtacagtctaataaatatgtatcatttctaacagaaagtactgggtcaaactcccaccccaagaacatgggattaagaagacgcagtgccggctgtattgccagctccgcgccgcgtgtcaataaaactctgaggttcatcacgtttcattcgctgacaagcgtggccttccaattcatctctgagctgccgcttcccactcagcatgaaatcggacccaccaaaaagcaatttcagctctcgcttctggcaaggtttccagttttgaggcagagctctggcacggggcagcctggtggtcagggaaggagaggggaaatgacatgcagtttacaaagaaagaaaggtcataaaataattataaagtacatttaaaacttttgctagcccacgtcggcttaagcctcatcgctcttcatcactggagcaggcgatgctcaggcctctgtagcagtgggctgcgtttacacaaagttgacctctgctagccagggtgggctccgagggcgctttccacaccccaacacaggcgcctgctttttccccctcatagatccctatcccctttgtttcctctcttccatctgaaagagcttgggagctcctttaaaattttgagggagccagttattatttcaatctcaaaatgtaatgtcatccagaacaagacactttatcatgaaattataatgacacgacgcttcgtaattcatcacgtgctttatttgccgattcattaattaatccatccaagattccaggataatggcctctaatcctacaggtgcaacagttcatggtaactgccgtaaattccaattacctttcctgatttccaggaagggcttggtaaggaatcattctgtttatcaataaggtgaatatcttaaccagtatacagtaagaaactctataaattttacaaaaatgaacattctgtcattataaatagaagccactttcctgtgacctcaagtacagcattcatttcctattttacaatgataaaaaaaggatcttatagaaaacttcaaacctaagttttaaatttcctatcctaaaccttaagtctcctatcccaaaacaaagatatgttcattgatgtattcagttctcctccctcatacctaaaatggattcggccagaaatctggagttggcccaagatctggtttccattccatttcttttgcattcagggtcaacagctaagcccatgagttatgaacatgaacatcagccaggaaaaagagttatccaggtgccattttgggtacgttctccacctgcaggaagctgcctgtcagtagctattgagagtctgaaacattcatgacggttgacatggtatttccacaccaggaaaggtctcctatgaaaatgatcccctttcctatttcccttgcaaaggtgtaatagacaaaaattatcattaaagtgttattcattgcaataaaaacaacctaagtaaacagtaatagaggatgggctaattatgttatattcccaggacaggatattattacataaaaatttgaaattgtttatgaaaattttaaattgcacttgaatatttaagttacagtgtgaaagaataaatacagtataatgtagaccctataaaaatgcaaaacaagactgaaagaatatccagcaaaatactctctgcctctctagctggtactgtcactgaagactcctctttctgcctacttcctttccttaagatgttaagacatgtcaaataaaaacatttggaatttttaaaaatctgaataaaaagcaatacaagtctatccatagtattggacatactgtaatgccactggataccacatcagtctgaaaggtggtcggcctgtaaatatgtgttttcaatctcatggagataatatgtgcggcacagagtagaaagttcacacttaaaaccccagaagatgcttcaaaagcacatcttcttctacagtaattcaaggacggagtgaggaacctgcaagaagctggggagctatggcagagcacgcaatgccgcatcagaatgaaagtgtagaagttaaagtcaaaatatcattgataaatcttgactttgggctctgaagcttgacagaaaacctatagttggttatgttggtgccagagtggaaacaggccgagagcactggcttatcgaagagtcttttaatgttttatttgagtaatgggccttgcaaattagcacccctgcggcctgaaatacatatcttttcaaggacacaccggttttccattcgacaggtgatacagaaagaaaatccccaaggggagctttgatttctgtacttttcagacacagttatattttattccagctaggatgatgtggaagataacagagagctctgagggtgatctgagggcttggagaggaaatggagcagaaaacagttcacagtgcaaaggaagggagggctccagggagggaaaatgggaaaggcagaggtttcaatccctgctccaatcctagtgacacttaatggggtctctgccatcttccctgctcatgggcaagggagggcaggcagctctcagacagatcaccccagtcctcagcaggaactgtgactccactgctcctcactcttatttgacctcattcctccctctctccggagtatcatttgtcacaaaatagcaagacagagtctagctcagcgctggcttttcactgggaatagtttaactggctcactcacttactcatctgttcaacacagacttactaagcatctactatgtaccaagtgtcatattaaatgctacagatatacagatgagtaatgcacaatttctgcccgtgagctgtccacaaattgacagtgttctttagtgtcaagaacacagactctgaaactggggaaatttggattttatcctcagctctgctactgccaactcggtgaccttgaacaatgtatgcatccacaccaactccttgtcatggactgaatatttgtgtaccccctaaattcataggttgaaatcctagcccctagtgtaatggtattgggaggcatgggggtggggtcctcatgaatgggattagtgctttttaaaaaagaggacagcttgctttctctctctgctttctgccatgtgaggttacaatgagaagatggccgtctgcaacctggaagggtgtcctcaagacacctcagctacactagcaccctggttttggacttatagtgcctggcactgtgagaaataaatttatgttgttaatagaccatctgtccgtggcagttcattatagcatcctgaattgactgagacaccccccattttctcatctagtctactgggataatgatacctaccttacaaattagtggtcggaatagaggtagaagcatgtgaagtggatgacccacagtcgatgctcgatagaaggcatgttttaaatgacaggtcgatctgactttccaaacaaatttatgtttcttagaaaaaaaattcggtgccaattaattttcagaaatctatcagctagagaattcagcacaagatatactttctaacaccaaatacaatttatcaccaaaggaaagaaagaaggagggctgctccagatgagaagagctgctgctgaagctgcctggaggtctgcactgtggcctgcacctcccatgtgcaggcaggtaatgagagcagagcagactcccaaactcactccagccatgtccttgaccctggtgtcactgacctgggaatcccagaggctcagaagcgctatccaggaagtagcatgtagatttaagtgacctgggctgcagcgaagatagtccctgctaaaagactgtgggaacaaaaatctatctatctgttgtctgtctgtctatctgtctatttatctatctatctatctgtctgtctatctatctatctatctatctatctatctatctatctatcatctgtctacctaccatctgtctatctaatctgaaaaagccaaatgccaattgaaaacccctggaaaaatgaaccctgtgaaggattatatgtgaataaaaactttatcaggaaaatttaatttaaatcacttctctaggagatgcaatttaatagaatttccctgcaaaatgtactcttcctatttgatataactttaatacatagtttttacaacacagaagtagatgtaatttctacttttaaaaaacccagcactctgaagtctaattccataattttaaattaatgttttcagatagatctaaaactgaaggatcatttattaagtacctcgtacaggcttggcattgggaatataccaggtgagtctcttataaaaccaatatttaaaatgcccccaagataagagagaagaagagttctttcttataaataatttttagaactatcccaatagaaaaatggatatagtacatgaataaaactttacaaaaagaaggatttatagtcagtaagcctgtctaaaaatgttcaactttccttactcatgagcaaataactaaaaatttaaacatggagatactctggacatgtatcatataataataaataattatgtacaaataaaaaataaaataaccacaatagtactgtacaaggatgggaagggccctgttgaattggactattgttcatagttgacatatacacaagctattgtgaccactttgttattggatgctaacagtcttactttttagaatctattataaagaaataatctgaggtgggaatataaattaatgctcagagataataccagaatttttttttaataatggaagaacaaaaacaccctaatatttaataacagacgtggacttaaagaagcatggcactgttctagaatattatgcaggcattacagttgtgttttaagcaatattttataagctgaaaatgtccacagaagaaagaaaaacaagatacgaaatagtatgcaaacatcactgccactatgcaaaggaaacaaacatgtataaagcaaaactgatcagaaacacatcaaaatttaacagtcgtcatctctgggtggtgggattattagaaatgtttggtttcttctccatactttctatatttttcaaattttctaagattaacatatatcgtattgtagttaaaaaagttaaatttcccttatccgaaacaaacaatcaaactcagaaaatagaaagaaaggaagagcctttgaaaaatgtatctagttgaaaggtaagggacagcttcacaaagcaggttctttccctcctatggtgtctccctctctatgagggaaacacagttttaattttggaagtctgcgattttttgaaagacaacaaaaactgaagtcaataagctgtgctgtgtatggaggcaaggacagcattcgctagggatcttcaatccgtcaagtttacagagaacaggtagatggccctgcaaccatcactgaagagtaatcctgtggttcttcctgcattctgcacagggtgcaggaaacctccctttccacaccatcgtcaaggtgcagtgatagcaaaccacatctcccagcccagctggggaaccaaagaaatgagacgtgcttcttttcaagccaacagccaactcggtatctcaggctcagtgtctccactccaatttggttcacattctttcactggcttcctcctgggtcttggtgcgctgtctctgtactcgcaggagattctcctcgagctcaagccgtggagcagacgtgatttaaattttatcctgtagcaccagtggtgggttcaggtgttatggtatctgcagcttttacaacttggggtgagttctttcgagaaaaagaatgagggctaaattacattcaaaatgagtatttagaatgataaaataaaccacattacaagtcttaaaacactgtagggggtgcttttaactgtgtgtgttgcacggtcatgtgtatacctggcaagagagaaatcccttaggaccaggcatccgtaagatctgagccatccactggtggatttactctcacgacggtggggtgagttccctaggtcagcctgtttcttctgtgtccctgcacagctcctgcacaaggcgctggctgacgtgtccatacgtgtcctatgtggctagggtagctacaccactgtggatagtggacgtgtgcttctggggtcatcccagtgaggacagcaatgctctcactgcacagggaagcacacgcgggcacacaaacacgtccttactaaatgaagccccgtgttcctactccagccccaggtttcaggaaagggaaaggagtgtgaaggagcagagtctgaagggaaagagacagtgactccctgggttgacatctcctattttacaaattttatcaacagatgagcatctgagcacgttgctagggctcctcgccagatctccaaagggtctggaaaggaagtgagagacagaagcatagcttcatggctttacggtcaatcgtgccctccctgaggcacagagaggtgatctcccagagaactgcagccctctcaaggctgaccccaaaatacgatgccacagaagggaagggagccctgcaaggagagggcccaggaagcagggtggagggtccctgactgacaggcactggctctctggcccgggcgcgccgtccaggaggcgcgtgttcttctgtcatgcagacactaccgcagtcaggacaggtggccttccgcgttttcgtttggggagacagagaaataggtcatgctctgtgagtggcgaaggcacatcctgtgtggtaaatggcttgttttcctgttcatatgtttggttttggttggtgttggggagggtataagtaacactctcctcttctgagttcaggattcattgagagactgacgagaacctgaggtcaatgtgtcaacgctgctccagacatgggggaggggtgtgactgcggtacaaagggctttcccttacttctccccggtttaaattaacaatgtggtcgcaggcaggcctctgtgctgcaaccacgagcagaccaggatgtctgtgtgctgcggccaggctgctgccaaggagaaccagaaggggtgcattttcagccaggcagattcctgctcacaagctcccctggcaggagaacagcttcttcccccaggagaagtcaggaagagatagggagagaggcaagcagtcagacacactcagaaatccctttatattgaaataaaaagctagagaaatgtgtgtcttctcctaaacacagcttctatgagttgcccctcaacttctccagatggtacagataggcaggggccaggttctgccagttgctgcacaaatgagcttgagctccgagtgcaagtttcagcctggtgtgtcctctctccacatgcactccaggaaggctgtgggttagcccacacagatgtctcatgtgcgaaaccgtttggaactagagtcatctggggacagctacctgcttctgctccctggatccaccaaggaccagcagagagaaggcataatcatggcacaaaacttatgctgctactaagtgtgccggtaaaatgcttgcactggaaagggaaatatctcataacaaataaatgaatgagccctttggattttacatcaatctctgtgagtttagcccatgcgagagagactgcacagctctgcatgcattggtaaagtcatgttttggcctgataggatggaagaccaggccctgagccacagtccatagtcaaaacatctgatggcatctgtaccccaggagctagcctgccggccaagacctggccacagccctctctcccaagtcgttgtgggctacctcctgagcagctctaaagggcctcctatggcctgcctcagctttactgactacttagtgcaaggaaaagataaatgatcatccattttaaattccaaactcatttctccaaacattctttttaaagtctctggaagaagctacttgcagttaaaaactgcatttgccaaaaagaggctgtcaattcaaagttcctgatcaatccaggcatttaaaagtctccactagttcactggtgtagctttcaaaacctcatcagcatatatatatttctctaattggctcgctatttacccgggaatttattctggatggaattatggagagatgatttctaaatgtctattttattgtcagctcttcttccacagctaaagactgacctaggatccaattattgagaaaactggaaagaaaattagctggagatacagtatagtcagtggtgacctatttataaaattcttcttaaaatcacataataatattattaccttgtgtacatagactatttcataactacaattcaacacatgcctgtcatttttttccctaatagctttacatagagttttttttaacataaggcaaaattacaacttataattctggataaactaattaaaatgatgctcctagataacttagccagcaatcatttaaaattaaatttaaattctaaatccctcatacagaatccccatttcttctcttgacattatctcacatggattgacattttaggatataaatatggtttgattgctcattcattcattcattcattcattcaacattatgtgccagggtgtttattcaatgctggagacacaaagctgagaaacgaactttgtccaagccaactggagtgtgtgtcttgcaggatagttagtgtgaagtgacgcacactgtcatattcatgttttggatgtctgcatgctgaggggagttgggaaacttcatggaggaggccatgcttcagataagtctttactttggccagcagacaaggaggacaagaaaaccacatgcagaatcagcagacaggataaatgcttgaagctctgcggaggaacagcctggtaaggggtcacagctggctagggaccagcaaggcatgtgaggacaggtggcccagcagcaaggcgtgctttcgggaagaggcaaggacctcagatgccatgtgaagggctgcaaactcatctctgggagctgggtacccaggcagaatattaagcagagaagtgttacgattcagctgcattttgaaaagattactctggtgagaggaagaaggataaatgcacgagggaagtatgagggatgaaacaaggaggtccacacctgagatgactataggtagtcttagcaagtctgtggtttgtgcagtggtggggtagaaaccggactgctgttgacgaagactgaataggaaaataagaagcagaggcaacaaaaatagcctcggctttcaagacatctggaagtgaaggaaaggagagagagaaagatcagtgactaaaaacaagaacctgtttgaaactatttggatttccttttaagagggagctgtttatgtgctgaaacaaagggaatgtattttttctttccttccctttttttttttttttttttttttgagatggagtcttgctctgttgcccaggctggagtgcagtggagtgatctcggctcactgcaagctccacctcccagcttcatgccattctcctgcctcagcctcccgagtagctgggactacagacacccaccatcatgcctggctaattttttgtatttttagtagagatggggtttcacagtgttagccaggatggtcttgatctcctgacctcatgatccacctgcctcagcctcccaaagtgctgggattacaggcgtgaaccaccacgtccggcctatttttttttttcatacttctttctaacaggtatctaaactcacaccacatccattttataaagttgttttttagaggggatgcaggctggtgaagaagctacctgcattttttaaaaatatgctaatctaaaatggttgattcttcttcttataaaaacaaaaggaaatgaaaaactaaagagataagaacatgagttattgcaatcagctagcactctcctttttctgcactccagggagagccacagaaatgacagctgagctggacaagttgtgatggacaaaggcagcctgttctcacatgttaagtccacactcaagaagtatgcagtttctagggaggagctcactagattattggaacatcatcgttagttgatatgcttggtttttatggtagctatctatcatgtctccttattatttatcaagaggcattagcagtaggagggagacccgtgggtcaactgccagccctccatgaactgggcaggatcaagtagaagaggtcagatcctaagtgagaggtcagatctcccaggctggcccttgcagcgaaaggtgaagttttaacacgattgcttcagtgtcactaaagtgtcatctcactttatatgctttatctttattcacacaaatttcacacagtactctccatatcctatgattcaatgaaaaagtatcaaggggacagtgagagatggaggttgattggaacagaccagtctgaccccagagatgatattctggagctgcctctgctcagacacagaaaatggatcattctagaccaaaaagagaacctgataatgcactttgcctagacagaacccaatatacaaagtccactgaagaaacaagagaacaaagggccatgtgattaggaaatggttatttatgtttcaagggtatgtgccacagcatgcttttcatataaaaaacaaccatagcagatttaagatacccatttactcaccaaaaccgtatattaatgccaagctcctcaatagtatttttaagcattcatatggtgtgttcttgcataacttcacacattaggtgaggggaagcattacagcagagtgggtaagagcatgggctttgagccaagcagatttggggtgatatctgggctctgctatttcccaccacataatataggtcggttaatcactccttctgaaccccacaatatatacctgcctctgagggtgactgtaaaaaatagaagagccagttatgaaaaataaacgcttagtgaagagtgtcatatggtaaacattcggtaattttagtgatttttttttaatgaaacgtatcatagaataatgtttaggaatttttacctatatttcatcccctattaaatccatctgctttatcttcccttctctctcctttctctttctcattgcccacttcctgaggcagcaaagccattccaggcctatgccctccaggcactgttgttaactgcaggcatgtgaagagaaatcacatacattaatctatgggcttagagtttctaaggtggacacaatttatgaaattatttctggaagtaggatggtcctctagccctttccttctgctccagggaaaatgaaaaatcccttggctagagagaagggggtggaaaatctgcagaggaagttggttcccaggccttgaggtgcatggcagagatggccatgtggggttcttaagcaaataaagcctaagacagccagacacagcttttcaagagaactgcccagttgttctggtgtgaaatagctgagcaggggtacatagatgcctgtcagagtggcatagggaaattgtgggtcattactcaagaccacactagcacaagggcatttcagagggcaactccaggtcagagcatgtccaggaatgggacagaacccacctcccaccaccccttctttagcacagtgcactaagcaagcttccccaaaacataaaggacaccctggaagagagagagaaaatgctgacctgatcaagttcgttcagaattgactaagaataaattcttgcccccaggtataatggaaatgagacaaacattaagttcttctatgtattagtctgtttttgcactgctgttaaagaacccttatataaccatgagatctcgtgagacttattcacaatcacgagaacagcatgggaaagacctgcccccatgattcaattacctcccacctggttcctcccacaacaagttggaatttgagaagagatttgggtggggacacagccaaaccatattattccacccctgtcctccccccgcaccccacaaatctcatgtcttcacatttcaaaaccaatcatgccttcccaagagtttctcaaagtcttaacccattttagtattaactccatagtacaaagtctcatctgagacaatgcaagttccttctgcctacaagcctgtaaaatcaaaagcaagttagttacttcctagatacaatgggggtacaggcattgggtaaatacagccattccaaacggaagaaattggccaaaacaaaggggctacaggccccatgcaagtctgaaatccagtagggcagccaaatcttaaagctccaaaatgatctcctttgactccaggtctcacatcgaggtcatgctgatgcaagagttaggttcccatatcttgggcaactccgtggttttgcagggtacagcctccctcccagccactttcatgggctgacgttgagtgtctgaggcttttccagtgcaagctgtcagtagatctaccattctggggtctgaaggatggtggccctattctcacaggtccatgaggcagtgccccagtagggactctgtgtgtgggctccaactccacatttcttttctgcactgccctagcagaggttctccatgagagccccacccctgcagcaaacttctgcctgaatatccaggcgttttcatacatcctctgaaatattgacttctgtgcactggcaggctcaacaccatgtggaagctgccaagacttgaggcttatagtctctgaaatcacagcccaaactctacattggccccttttagccatggctagagtggctgggatccagggtaccaagtccttaggatgcacacagcagggggggccctgggcctagcccaggaaaccactttttcctcctaggcctctgggactgtaatgggaggggctactgcgaagatctctgacatgtgctggagaacattttccccattgtcttggggattaatattcgactccttgttacttatgcaaatttctgcagtgggcttgaatttctcctcagaaaatgggattttcttttctattgcattgttaggctgcaaattttccaaacttttattctctgcttcacttgtaaaactgaatgcctttaacagcacccaagtaacatcttgaatggtttgctgcttagaaatttctctgccagagtgagccgagatcacgccactgcactccagcctgggcaacagcgagactccatctcaaaaaaaaaaaaaaaaaagaaagaaatttctctgccagataccataaatcatctctctcacgttcaaagttccacaaatctcttaggcaggggcaaaatgctaccagtctctttgctaaaacataacaagagttacctttgctctagtttccccaaaattcctcatttccatctgagaccacctcagcctggactttattgtccatattgctatcaacattttgggcaaagccattcaacaagtctctaggaagttttaaactttgccacgttttcctgtcttctcctgagccctccaaactgttccaacctctgcatgttacccagttccaaagttgcttatacatttttgggtatcttttcagcagcgccccactctactgtttttatgctgctgataaagacagacatgagactgggcaatttacaaaaggaagagttttaatcaatttacagttccacatggctggggaggcttcacaatcatggtggaaggcaagtaggaacaagtcacatcttacatggatggcagcaggcaaagggaaagcttgtgcagggaatctccccctcatagaaccaccagatctcatgagacttttattcactatcatgtgaacagcatgggaaagacctgatcccatgattcaattaccttccactgggtccctcccacaacacatggaaattcaagatgagatttaggtagggacacagccaaaccatatcaacattttttttttttaaagaaaacctcataataatgaggttacagttttgaagacttagtctaagtttgtagcttgagagattatttccagttacaaaagaaatattgaactgattccttgtagaaccaaagagttgagcgggcagcgtaagtgtgtgtgtgggctggcaggatggtggctaggaaaaccaaccgccatggtccagaagcaggaccgtggaagaggaagcagagagttaggatggggatttatctgcgttaaaaaactgcaaggccatttgggcctgcttctattactttaagttaccgctcatccaacagacgtaaaggacatggttccatgtgcctgaaatacctcccatccctccgcacttcctaccaaacccctccctttttctagttgttcagtataaaataatcctacagtaaaactccgttttaatgtcttttatctatggacccttccctgaccccatgcggaatgagtccagcattctctgtgctcctgaagctcctcacacacactgcacattcatcaatgcttagcactacgctgattgctaacatttatcggggactcacttgtgccagacactgtcatgagcactatatatacgcatcaatcaactaattttctcatccttctggagaaggtgctatgaagagttctgttttacagagaagaaaaccagcatagagaggtagggtcgctctcctgaggtcacgtggttaggtaagtggattgcaaacccaggtattctgagtctaaagccctgctattcaatactaggtgatctgacgtttcacctgtgcctagagatttaggtgaaccgaggttcccatcctcatttctcccggtaacttgtgggcttctccatttatctgtccattcagaaaacaaacaggcgtggaggcctcctctgtgccagccagggctctcctggggaggaaagagctctgttgtcacccctatagccatgggcctttcctgtgtgctgcataaacggaagccccagctgctctcctggcacacccggagccctagagcccagcacagtcatcctcaacctcaactgcaggctggaatcatccaggcgtctttaaaaacatactgacatcgagtcccatgcccatcaattatgatttaattggcctagggtaggtcctaggcattgggatttttaaaacctcccaggggctggcacttctgctctggaatctccagtcgggaaaatactcatggaataaaatatcctcctacagccctatgaaattatctcctgaggaggattagttccctattctaaaaaatttcacccttaaaaagaaagctaggtgtaatatgacagctcagcagtggcaaggccgagtgcaggccaagatcctgagccagcccttggtgcacgcagctctgggcttccccagctcctctgccgggtaagctgggacagatctgaagggcagtggggtttgtccttcagaagttcccttccacggctaagagggaggaagaaacaggtttaccacacagctcaccagggagcttcaagaacagcatggacgtttgatttacagggtaaactggtgaaagacgaaaacgtgtgccgcgcctgtaacaagcagggctgctccatgggaacacctgtgccggcgcagcccgcccaccccggacagcgcccgcaccctgtctcccctggccaggctcctgtagccccaggcagaaagggagttgcgaattatttgaggatatgctgagagtgtcctgcctgggtgacaggagtctcataaatcattccttctctgtatttgatctctctttcaagcggagtcatgtcaactcactggggaatctgaggccctggaatcactgtgaaggcatcgtttgggtgtgcagagctgcaagaagagacaaaagatgatggagctaggaaaatagcagaggggccagccagaagataacatacaataataaaatcaataataataacagtatatactaattgctactaattacttttctctctagcattttttttaatcacctgctcacttgtgatttgtttggtttttgaagttctctccctacttcaacacagcctccatggtgacagggtataacttgttcctgctgtaacctaagtgcctaaaatagtaccaggcatagagtagctgctactaaatatttgctgaattaattaaatataacaggatttatgtgctatgatgtaaatagcccatgtgaactcatttaatcatcataataatactgaaaggtagacattcctgatgccatgtggaaacaaggaaacaaactcagaaaaattacaaaattcccctgaattaaatatgtagctgagtagatgcccattcaattttgactactgccaggtctgtgctctttctaccaccccaatgctgggccccagtgaaaaaaaattaagaaagtagatggaggagaaagacaataatgatgatgaggagatggaggagaagaacgaggaggagataaaataaaagcagaaggaaaaggaaagtgaacaagttcaatgtgaaagaaaggctggttagggggtcaagaagtagcactcttctcaaatgccaccgatggaagagagaagtgtagcagcctcagggaagatgagagtaaaaatgaactttctgtggactcacttggactcactgtcacttcacattatgcacaatgattttatttaacaacatccttgtagagctcaagtaaaagcaagatacattgtacatacccaggcagctttttttaaagccctcatgaatggatgtttaactaatcttaaaatgcacattcagctgcactatctcatgatgtcctggatctgtgaaaaccgaacacacccatattatagattttacacacacacacacactcttccaaggttggacaaaggttaaacgggctggtcaaacttgagcataagtcacacctgtgtcaggaacagaatgccaaaagatccttaatgttactccagtagctgtgtattctggaactcccagacaggtacatcgtctgtctcctttgctcatccaaggttcagcagccacagtttaatcacactttcccaatgggaaagactttgcagcaattgcatctactcagtcaaaagggttccagaatgagaaaaggctggtgttaacgccttaagattacattcttagtccatgtggtttgcattcaaatgccttctgcaggacagccgtggagtttgtcagaaaacatcagaccgcctttgttggttgatgagtgagaacagttgtcaggagacacaggaaggaagaagccagcccaggtacacatgaaggggatgagcaggatattctaccaaaggcaagtagaacttacttaatatggcaccaaagggatgcttttccaggacagactattctgagtcatcaccacaaagacaacaaactgagttccttgagaaaagggttcggattttgtttaccaatgcagtcttctatgtgactttttttttttttttttttttttgagacagagtcttgctctgtcacccaggctggagtacagtggcacgatctcagctcactgaaccctccacctcctgggttcaaggaattatctgcctcagcctcccgagtagctgggattacaggcacccgccaccacacctagctaattttttttgtattttcagtagagatttctatgcagcctaactaaaggtgtaacaggtaccaaatgcagttgactatttaaaataaagattaataaataacacaaatcaatccatatactagacattctttaagaccatggcatcatattaattaactgtagtggaaacaaccacaaaataaagacacaacaagtaatcttctcttaataaaaaggcataattggctaaaataatctaaaaggaaatgaagaatagcgggtgtgggaaaatagctctgatcctcccttgataaatacgatgtcaattattttcttctctgtgtaatgtaattttgatagtataaaaatgtggtgatggaactcaggaagataaccccctggagaagcacctgagtgataaactgtcaaagggacaattctctgtggaagagagcagttctgataacctggaccaggggatgttagaatgtttactggcctcaaaagaagacgtaatctctgcttcataaatcagctggaaatgtgagtgtccttcagcccaaactaagacaggcacaaggtgtggacagaaagtggttgaaatctgcttgaccaccaagaccccagttggccaccaagaagattaaattaaatccaaaagctggcttataacatcacatgaagcctgtatttgtagaaggaaaatcagctggtgaatatcagtctggcaaactgaacatgcgaagaaaggatttggaaggatcagctcaggatagtcttgaacctagaaaaacagctcttgatgtaagaaaaaggtatgttttttcatctgtttgttgttctgtctgcttcgttattattgttgtttgaatctagagctgtgcagttcaggagaactttctgtgataatgaaatgttccatcaactgtcctgtccagtggggtaaccacatatggttattggatttttgaactatggatagggtgattaagaaagcaaatgtttaattttaattaatgtgtatttaaatttattagtcactcatgtctagtggctactgcattggcagcacaaatctaaagactcaaaaatcagcataggacccaagaaagtcaggacaatgagtggtttaggaatgaatatggacccaaaccaaatagaccctccaaatttctagaaggttgtaacactcctaataaatctgatggtgatgccaatccaagtcaaccttagtctaaagagttataaagcttggttctcttagataagactaagacaaagaaatgtgccacagtgtattgccttacagactatgaaagataagccagtctatgatcaaaagttgagttatgtctatatatgttaactcatccactaaaattggcacatttatataattcacccactacattctgggtgcattttgaggccattgtaaggttatgggtcttcatgttaggcttgcaatgatttgagtgtgttgcgttagtccacagaggggcatctaactatgatggggaattaagaaaagattttccagaaaattagactgttaacgatttttgagttgactcttgaagatgaataagcagctaacagggttggggatactaaggaaagccttctagaaagataacacaatttaagtcatggcaaaaagaaatacaattgtcaactgcatgtaggaaatgcaaagcaaataggtgtatcaggattattaaatagaggtagaagtagtaggatatgaaagaggtatgaaaggtgaggttggaaaaaattacagggtgtgatcatattatataccatacgtactaagagaatggatttgagtttgctgacagcatgaggaattatgcatggatttaataagtattattttaaagagaacactgtgtccaaagagaattatcagttctatatgttttggaggagatggggatgtatggtgagacagagcaagtgttggtgggagaatgtttataggcagacatactagttaggagaatatgtttttaaagttcgaacaagaataataaggacctaaattaagtcactactacagaagttggaagagaggtgaatgattcaaaaaatatttaagacaaaaatctaccttccccaatgacaactaagtcatacacctaagtgggggataaatgaaaggaaaattcgtggacaaatcccaggtttctgacaagacttgctaagagagattgtggtgttgttaagggagaaaggggttatagacaaagtagtaaatggggaggtattgatgggtttatcttgagggtattgagtctgaggttcctgcttcagatatttccatgcgtacatcttgagagagtggtcttcactggagatgtggctataacagtcatcatcatgaaacggtagttaaaatgatgatgataaagatgaattctcagggaggatgaaagagaacagtgaggaaaaaagctggcaccctacaaccccagtgtgtaaggggaggcttcagggagagaaatccagaaaggagacctgaaagaaaggccccaaatggacagcaaaccaagagagattgttaggttataagaaagcaggagacagagaacaattgaactgcatgaaataaagcagaaaagtcttgaatgacacaggttgaaatatgtccattgaattcagtatttagagattaatggtgaccactacggaagaagccttggtggaatttacctgaagaacagaaggcaagtatctggggcttaggaggaaaggacacagaagtagtagtattattgagggcagaatgattaaaaggagacacactaaatattgaaagatagtttctctggaagatgagatagagcagtgggaaggtggtgagtgaaggctttttatttgttataaattttcatttcttttcacattatctcaatgatatgttttactttattattacaaacacacaaaaagataaaaatcatcacgaagatgaaataattctgggagcgaacatttaacaaagatgggtgactgagaaagaaaacagaagccttggctaaagatttccttgagaatgatagttaaagtcatggaagccacatgactcagggaaaggagagagcaggcagtaagaaggcgaagggaggtatagatacaagacaaaggagataattcatatagcaatgacccatagtagatgagcaaaagaggattaaaagaacaagcagaagatttccgcttgtctgctaagaggcacataatatttagaaacagggggaaataaattggatatatgtgtgtagctgagaggtattagaagatcattctacttgctgagattgaaaagggtaggatggggttcaagatagtgaaggtttggaatggtaatcctaagaatgggaaagagatgtggtcaaagatagaaataattgtgcggccttttgaggttcagctggagctagagaccacacattagtagtggcacaaatccagaatgtgtgacattttcttcacctgagctcagtaacctgggtatgaaacaaagaatttgagtgtcacattgatccaccgtggtaagtgttgtggaaaacacaaaggttacaaaagagagaaaagtgtgctgagaaagagatgagatgagctgggtaagaaaagaaactagcccacggagatgctgacagattgggagaaaacaggactaggaatctctaaagttgaaggcaggtgtactgagagggaacatatgagacagtcaaaagcagtatcaagtcagagttaaaatctcaagattttgaattacattgaattaaaattaaattccagtcttgccatgcctaggtgtatgacattgagtaaattacttaaattttatgtgactcagttttcttatgtgtacgatgggataataacatttatctcagagtgtttttatgaagactagatacaataacctatctaaagtacttatcataattcttgatatatggtaaatattcagtaaatgataggaaacacatatacacacaatggagcttcagattttaagataaagaatctttgtgatagccaggcccccagatgcctcccttattctgcagcaatccccactttcttaagtagatccctcctacacggaatccagagaggcctgtgcatccagtaacatgtgtcagatgtgatggtatctgactcccacagtagcatcacaaaaggcgttgcagtttccaccttggtatttcttgaatgactcactctggaggaagccagacaccactttatgaaatcattcaagcagaccaataaatccacaatgtggggaactgaggcatcctacaaatagccagcagccagttgttagccatatgagtgaaccacattggaagctgatcctccagttccactcataccttcagatgcagacatcatgacagcatcttcatgagaaactcaagcctgaaacacttatctaacttattcttgaatttctggcccacaaaacttgtaggagatcaacattattgtggttttaatccactatggattgggagtaatttgctacatagcaataagtaattaatacaaaatttggtgcctagaaaagaggtgttgccgactgtaaaaacgtaaagtacagacaatgcaaaggctacaggatattgatgaatgttacagaaagcctaaataagtttaaagagactggtagcataagcctaatggttcttgagaaggtaatgagtgatcttttatagaaaagtgaaaaaaatgtcactggaaactgaaagaaaggtgattgttattatgtggggcagaaagcttagcaaaactatcgcctgcaacatataaaagtacaaaatctatctaactaggtgatctagataagatttccaggcagagttgaaggtgtacctaagtttttcatgctttttatactaaaatgagagatgaactagagaaaacacttttaaatataaaggacccagagcgtactggttttgaatactcccagaatctctagatggtgcttgatagtaaaattttaaaaaatagcttctgggaaaaaatatagcctaggaaactatcaggcaaacttggtattagacattaaaccgagagtgtagttgtgaaatcttttgttaagatctcagaaagatttaggttggcgcctcagagaaccattcagtaagacaacagggcttcttagaagtttaaaagtttgtctaagggcagaaacccaagatagacaaagacttctctggaagagatctttgaatattttttcttctaataaaatgaacctcagtaatactcacaagggacctatacatctcacaaaataattgttgttgttgttgttttttttcttgagacagagtctcactctgttgcccaggctggagtgcagtggtgcaatcttggctcactgcaagttcctcacgggtttacaccactctcctacctcagcctcccgagtagctgggactacaggcacccaccactacgcccgactaattttttgtatttttagtagagacgcggtttcactatgttagccaggatggtctcgatctcctgaccttgtgatccgcctgcctcggcctcccaaagtgctgggattacaggcgtgagccaccgcacctggccacaaaaggattttattgacagatatcctgtcagattggattgaaagaaaacaaagatggtacaaaattaaagagatctttggatgcccaaacatctacatccaagaagcagctggaaaaagaaacactcagttgtgaacaagactgcctttaaagggaaagaaaaaatgactgagaaggtaaaatcaagagcccagacgacagagctaagaaccatggagaaatagcccaggccttgtgtctgaatcaaggaactgtcaatatgtactttgctggatttcagaattattatgaaccagcaactcctatgtatatcctgttgtcctcttttttgaatggtacaattgacagtgattatgctatgcctgtccttctatgacatgttgaatgtgtgtgagagtatgtgtgccagtgtgtgtggtggggagagcaggaaaaactgtctcttcagttcttaggttttctgattgagagaagctactcaaggctatatggaaggaagcacactgaaggaccatcatcctcacctagaactgatgtaaatgatgagattctgaattccaatcagacactgtaatggggtaaaacttttcagtgctttgggagggggtaagtgcattttacgttttggaggaatatgaatggttaagggacagagggtgaactgtgatggccaacttctaaaatgcccccaaccatccttgcctcctggcagttatgccccactacagaacccttccacactgaattatggttgatttgtgtgtccagtgaactacagaagaattgacagtgggtaactcctgaagttacatcataaaagacattgaagtgtctaccatgatctctttcttagatcactgccatgtcatggggacattcaaacagccttatggagagggacacatgatatgaacttaaagcctcctgccagtggtcaatgccaaattaccaaggcactagtgagcagatccttcagccccaggtaagcccttatgaccactgccccattgacatattgactacaacctcctgagactcagagctgggaccacccggtggaaccactcatgcatgcctgacccacagaaactgagatgatgagactattatgattattttaagatgataattttcaaagtcattggtatatagcaatagataattattacaattccctgatgatgaaatgttcagtttgttgtcgtggaataggaatgatgaaagtgaagtggattttgttccttggagatgaagagaacatctcaaatcaaggtgttgaattatctccatgtggacactgttgtctcctggttagtaatgtgactggaaaaaaataaaaagaacagactgcctagtctccaaattcttccgtaactacaggttagtggtttgcaaggaggtcaaagtttataaaaatgagagtagaaagcgtagtaaaattagattccaaacagagatctcacacctcttttatttttcaagggcaaaagattaatccttgggttgcagttttttgtcccgtagtacttattccccagagtttttgttgttttacaaatataatagcagttataaagacaatagagatgaaaaatcacacgatcccaacttttcgacacatcatatagtctattagatcttgtatgtgctaatatttgtggatacatgaatgagaatgattatataactagaacataagaaaaatttataatttccatcctaacaattattctactataatcatttatgtgatactatatattcttcataatttctatttaaaatagctctttgaatgaatataggataatttgcttagccattcccatgttgctgacctttacttttactttttctccaattaaaaatcatgctgtgtagagagcttccttctacttttgaacaatttcttcatgaaaatttttcttgggtaaaattactgggtcaaaaaggcccttggacattctaaacagcaacaaaacaaatttattccttattctggtatagtcttagaataaactatgagatgctacaggattcagtgaaatgggaaagaagagaaagagagttgggcaaccagagatcaaaagtggaaacagtggcatttgttggagcaaagccattggtatctctacgctcagaatgaagtcaaggggtgttcctatctttcacctctataaatcgcccccagtcttccactgtctcccttccctcatctaactgctcaatattaatcagacacttagctctccccctgtaggacacctagatagctctgctctggacaaagctaagaggtagggagcatgcactgagatcaggcaggaattgcgctagagtgggaagcattgctattctcgctttagagaaggagacatgggctgagaagctaagcgccttacctgtatttgaataatgaagaactagtgaagccaggatccaaacctcaaaactcatgtctattcttttgcagtacacccttttaattgtataatgtcgcctgtacttcatgcttaggaccagaaaattcctaagtgccagaaagttttacaagcttatctgttgaagagtagattacattctttggtctaagaagtttaaataccctccctgcttcactcatacacacaagtgcatacatcttccactagtgtaaacttgctattttatttttcagtttgaggtgatcaaggaatatctgaatgtctaattctataaagaatgtcctgtgacttataaaacttgtaacatgaaagtctgaccttcttggaggaacatatagcttgtcctccacaagcctgatggactgctcagtttgggctgtgctcccttctacagtgtccatgtgaggaagcagctccctgtggttctgtagaatcagagctgtttgtcatactgtagttacttacggctcctggtgttttgaaaacacaagactcatcctttattgaaagttgtttgttttaagtctcttcattattttgcagttaaatcagctattttacattaattaaaaaccaaactaaccaaagactgtagtagcatgtggtaccttcaaccttgtattgaactctcagaaaggtgagaatgtcaagaagggttactaatgaagaggatcaaaatatgctaacccaaaatatgccacgtggcatagagatgattttgagctgaaaacaattgagcaacagcagatggaaaaaaaagcctcccacccgctaaccccagcacgtttgcgtaaaagcaggcttagacccttaataacccgagataactcgactcctatcagctcagaaatgacgccaagcagaatctatataacaaatcttactgaaataacttgtatctttaattacttttccccacatatttatctcctcacagtttgtcaccccaaaaagcctgatcctcttttcctctgtcttgtcacttccctatacatttattgttctttgttaagatgttatagaagctcaagtcccaagcacccttttgtcccttatcactgggttccttcccacgtgtttgcatgctgcctctgtaaatacatttttatgggtttgtcctctttgtctttattttgtccgtataatttgccaggtcccaggcaatgaacctaagtgggtagaagaaaaagtttttttcctccctaactagtattctggaacaaactttgtaaacagctgtgatgtctgaaaaagaactacccacaggcaccaatcaaccagctatagccaagaaaagtactgctgcagatgcagaaaatttcatgggtgggacataataccaacctaataattatctcctggaaaatcccaccagctgatagccagatgatcaagatgttgtgtatttgtgtatgttggggtggaggcaagggaagacagtgtgtgataagaagattgaaaaggaaagatgaggataaaaatttgtgttcattatattattttctgaattcctgaatgatgttatctctcaaatgtaccagagcccaaagctagcttatcatcattataatcataattaaatatgcactaagtcttaaagtacagtcaaaatcaatgcctctctggaccccatcagtgttttggtacagctcagtcacttggactcgtttttgcttattcaacctatttcgacaaacagattgcacttccactacaggagtacaatcttaaaaaaaggcaggtgttatttgatttgtgtctatctgtttcccccaccctgtgcaaaaaagaaaaaaatataacttgatcagtatttgaatctaacctgtcacttctaaatgtgcatattgcttagaagagtcagagggtacagaaagaaaagggagaagcaggtgtcgaaggataaatagtcaggaaaagatgctaagagtagagctgacttattcttactacctgcattttaactgaaggagtgaaactaacaataacgtatctgtgatgtatctatttatgtgctcttttaattaagtctggtcctcccctgccccttggctattggctccatgggaatgggaagaccaggcaagcttggttcactgttactttctcagagccacatcttccgcctggcatatcataaacatacacactccattagtgtatgtttgttcaatgaatgggttttgtattaaataaaacaacgtgaaaatgggtagaaaaagcagcccaaggtgttaagttattctgccctgagacattcttcaatgtttcttcagactatttctgtaccatctgcactggtaggagagaaaggtctggggagccctctcagtataatttattatatttatgtagcacctatcacctcgctactctatctaggtcagtgattcccaaagtctgtttcgtaatgtgccagaatatctctgtggggccataacttcttaaaatattctcaaaattaattttcatatcattgaatttttaagaaataaacagaggccatgaaggggaggcattatgaaagcaagaacacaattctaaactacaacatttcctgggaagttggcaaccagagatctgtatttattccaaagtatttatggatttacttatgagttcaatttctcaacaaatatttattaaatgtttactttgtgtcagatgatataccaggtatttgatataacggtatgcagcaccgaatccttactctcaagttgcttgcttaaagggcaatgtgatgaagggacagtatgacgtgaagctcaaagttcaaatccagcatccactgggtgccagcatgggtgacagagggtgcagtatcctatttgtcttacctttcctgatgtctgtattcctcataactgatactacctaaggaagcctctgctatttgaaacccagtatatcctgagcctgacagaacttatcctgtctcatgcactcacttccaaagactctcaaattgaggtgagcactcccagccagccttcaattcagtacctctgtcttctgagactttgtatatcccatcatcaggtacctctgaaacaaactaaacaggctcattggtaaaccaatttccccactcatatacctgaatcttttcttagcacacctaggttaaaaacctgaaaacatttttgacactttaggatattagaaagaacttgatcctgagaatcatacagacatgagctcaacgtggtgcaggtctgtgctcgtgtccatcaagtggcatgactcgactcttcttccacaaaaggatagttgttctaaccactgagaattgttatgagaattaaatgaggcaataagtaaggctctttaaaaaaatgccaaggactgtgaaactatgcaataatcgttctttaatccatataacttaagtccttataatattacaatttcaactctaatcactaaaggcatttggacattggcattgttctaaatatattttcgatattcattcatttaaaaaatcatattaggataattaaaagcatttcgggccaggtgcagtggctcatgcatgtaatcccagcactttgggaggccgaggcaagcagatcacctgagctccggagtttgagaccagcctgaccaacatgaagaaaccccgtctctactaaaaaaaacacaaaattagctgggcatggtggtgcatgcctgtaatcccagctactcgggaggctgaggcaggagaatcacttgaacccgggaggtggaggttgtggtgagccaagattgcaccgttgtactccagcctgggcaacaagagcaaaactctgtctcaaaaaaaaaaaaattaaaaaataaataaaagcattttcataattcaaaaatgacttcctttagtaaatggtgtgagataatgatgtgattttctatgctgtgaatacccagtcagtgacgtaaccgcagtcgtatccacatggctactattccaatggatcactgctccgacacaagagtggtcttactagttattattaaagactacatgtttgtgtctctccaaaattcatatgttgaaaccctaagcaccaatgagatggctttaggaagtggggcttttgagaagtgatgtggtttagataaattcacgaagatggagttccagtgatggtattagtcttcttttaagaagtgaaagaggctgagaggtcccaccctcaatcatgcaagcacatagccaaaagacaactgtctacaagccaggaagtggctcttcaccagacaccagatctgctggcaccgtgatcttggagttcccagacaccagatatgctggcaccatgatcttggagttcccagcctctagaactaggagaaataaatgcctgctatctaagccactctatctctggtatttttggtatagcgctccatgccaaccaagacactactaatgcaaaagttgtgatggctcatagtcatatattttatatactttttataatatatattatatgtaccctaaaacttgaagtataataaaaatatatatatattatatacttatacgttatatataatgtacaagtattatatataatgtacaagtactctatataatgtaattatatactcattatatataatgtatacatatataataattccttcaaaatactgaagtacaattatgctataacattaaatgttaagacacctagttccatccaaaacaggttgagtcggaattccaggtaaattacaatacgtcctactaaacattttctctaaatgtgttctttgcccacttttccttctgcttccttctcaaattcttacgtattcccaagatcaatggagtcatctatgtgactgatcagatgatagggccatgttcctaacaggcagggttctggtgcatgacaacgtcatgctcgtgaatggacttcctctttcacattatgctcaggaactggtgagcagagccaaggtctttttcctgggttccccctttctccctgcttgataatgttggttattacttcattattcaaccatacagaaaatggtaaatacttgagacttaggttcaaaaggaagtagactgcacaccgcataccagctctactagattagcactgggatatgttggaaactggaactgccagtgataaagaggcatttcccatcccatccccaatgtcaatattttcacacctccctcagaaaccctccaggaaggaaggattatgggaaggacatctgattagatcagagcagaagatctttttgcctgaaaatatttttagaaattgcacaaaagtaattagtaggatcatgaaattttctttcctaaaatacttttcaaaaagaaatgacccttcccatctccttgatcagattagaagaatataactacttctcttcctggaatccaaaggaaaagccaaacttctgtattagaatccagattaaaacatggattaatcaagcctgctggtgtcacattttacaccacattcctcagaacagggggatgtcttcctgaggttaaatcataattgctttccgctgaggtctccctccatgttcatgtgaaaagcagccttaaaagtttcccattatatcacagtagcatctacgtgacacacaggggccaaaaatgtctctattcatttctgtcttgccacaaactcagatcgcattctagcagacaagacagcattagaagattgttctcccaggcagaaagtctttccaggacagtggaccttatacatagcataatgctttgtgtcatgcgtacctactctaatcatctcatgctaagtgatccttggcatttgtgtctaccctggtctagatagcaaagcttcgttagcctattctgcccacagttagtattcactatgttttaaaatatattatggctcatgcaaaggtagtagacataaacaaagaatttgaagacagaaaatacgtgcctatgttgcaactcctcgaaagattttaggcaagccactgaaccactctgtgccaattcaggggggactcctggcccattttttatgcactcgcttgtccataaagacaatccattgaccccagctgaagtttttccagccatcactgtctccccctcattacttttgttttgaaacttttgcctcccaactttgaacttttaggacatcattccagtgtccacctctcttaaactggttctttctagtatttcaactcagcgctttcctgaggatatggtcttagctcatttcaaactttgtctccacctctagccatgacccatgctagccaggctgctgtaagcattgatacagagagccaaattgaaggtctcaatactcatctgttcggaagacccttttgcctgttattgaggaaagaacagtgtgtaggcattgagcatgtgttatgcattgactaaaagttagcctgcattaggcactgccacggagagccatacgtgagactccactaggaaatatacagagatgtaagaacccaagacaatatataagcatgtgcaaagtaatacagtacaaagggagcaaataaatgctgaggggacacccaaaatataaagtgggggaatgcttcagagagccaaggttataaatactctctagaggccacagtggtgaaactaagtttgaatcaacattcacgagcaagctcgaggaagtgaacgagctcctaaatattcgggatatggcagagcaggcagctcatcaaggaagtgaacgagctcctaaatattcgggatatagcagagcaggcagctcatccaggaaccacacccctgggagaaatgtctttcggcaggctcactgctgcaccagtctttttcacgctctcacactcacacagccacacacatcttctcacacacagtagacttcatggtctgtggctgcatttcagtcactgtcctcctacttccagggagaggaagctagagatgatttcttcagagccatgctgcttcatgccaaggcttctgaacctgtggttcagcatgccagccgcttctttccaactacccaaaaagagccgtctcataagaccatgttccatgaaactcaccagcacaagtcttcagtggagacaaactatagtgtacaaacgattaaaatactgttaatgatgatatcaaggtacttgaggctctatcagggaaactttgagaatgagacattaccagaagctctggagccttaagcacttgtcagttgatgttttgaaaaattgcattagctttatccagcatccatgtaacctttctcctctcccttgctctgtttccctggcaaccatttaaaagtgctgcaaaaggcattgctgtcttgcaaaaaaaaaaaaaaaaaaaagaaagaaagaaagaaagaaagaaaaaaaaaggacaatggtcttaagctttctctctttcttgagggtttttctccatcttcccaaccacttccctggctcttggaggtggtgcagcctccagagctatttcacgttgaatgtgtgagcgcagtgtaattaaggaggcgggtgtcaggccaggtggaagcagtgtctatgagaccctggttaggcattcagggtcaactaaagggctccatgactgggatagagtggcactcagagcagaaacatagcaatagaagctttcagaaaggatcctcctgcctcccagcctctaagagatgggcctgcatagcgggcaggaacactggtgccaactgccactccaagggagccactcctgagatggcagatgaggaagctctgtccctggggacagctggacaggcccagcagggctctgctctgagcagctgtggaggcccagcacctccagttttgccctccccaagctcttcacaaagttgttgttttttttttttttaactaacagaaaattcccttgtctcaccaatcccaaatttcctggctccaggaaacagacaaggagagaagtgatgtttcacactcaggacagagccactgctaacaacagacagaacttgaggcttttgtcaccattctttgaactgtttgtaaaagacctctggttatttttgtttttattttgtttgtttgtttgttgtttgttttaacaaaaagaagggaaaatatggaacaccaccctagccaagtgccatgtcacaggacttacacaagcatctcatttattctcccacaaagctctgtgaggagacaccactctcatcggcgtttatacccactcctccccccacctctgtgtctcaggggtaaggtgtttgctcagggtcactcagcatctcagagctggtttctgactcaggtctgtctaatcccacctattatttccactgctgcctccccggcctcacccacgagacagtcagaggtcgggattaggtttttcctgcaaaatggattcagaccagccttttgtaactcactcatctcagtgatactgatctgaaaaagggggtcctacaggacctcctctggcaggtatgatttcataacgtagcatcacagaggtgggtttttgtcatttttgactcccgggtaggtattaaggacttccaggtgcttggcactctgagaactgaagagaaaagcatgagataaagagctgtccttcaagggcaagagtggctcaagccctgtggtaagagcaaggcttgcgaggcttcccagagctgagaacgaggacctgctctgctgcttgctgactgtgtggccttgagcaagttctctaagcctcagttttcctacctgtaaaatggtaacaacattaagtcctacctcagattactacaaggatcaaatgagatgatgtgagcaagatgcatgtagggtaataatagtaactagaattactattattagttgattttataattatagtgataataattaaatagaagggtaaaacagattatgacaaagttccaaagtgaaagacttatttttaaggactattagcaaccaaagagataactaggagctggcattcaggaaaaatcaatacaggaattgaatttggcctagggttttcagaggcagaaaagcagctaagaggtattataggaagcagtgaaagtcatgaacaaccgtgtaaaattgggaataagtaggctcaggtgaagcacagtgacaaagaagagtggcagattcttttgggaccatgaaaaaggaaacagatgtgaacgaaagatggacctggttctggaagaccttaaagttggccttgttctcaagatcattgcagctttttgtcaaataggatcccaacacagagaaattttggtgactccaggaactggaggaatcacttccagtaccagccaaccttgcaaccaaaaggggcccactgggagacggcatcgtgaagtgaaatcagcccagagcctcttcctcagtcctcagacactgcgattgactgcatcttttactcagtgactccggtgaaagagcaacagaacctcagaagacggaactcagaagggagaagtttatattagacaatgacatcaacctaaataagaaagagttgctggttttgttgagaagaaattacagattccaggcaagttaatggcagatgcaatatgctgttttggcgacgtagtgtatatatacttagagatgggggagcgggtctcactatgttgtccaggctggcctcgaactgctgagctcaagccatcctcctgcctcacctggcttcataatattttaacggattgagtaagcaagtgcttaaaagagtttgtgtcatcctacaccaaatcctgatcttactccaatagattcttttattttagccattctattatgttattttatcctccagctgcttgtcttttttttttttttttagagaaaaataggttgaaagcaaaagtgagcctgagattattcaatattgattcttccgaaaagttatcataacagattggttttaggatgggtttgatacttgaggggatttgttaagacactaaaacacgaactagcacaagttttggaagccagttgatttcatttagccatatcgaccctgcttcctgctgggtttatggaatcctgtttggttcactgcatcttcctctctttctacactctcactcattcacagatatgtatcgaatgcccgctttctgtaagctcctgttctaggggctagagacacagccgtgactacaaaagagtgcccagcatcatgcagcttatcttctagtgggagagttagatttaaaaatcaaaaccaaatagaaccacgttgatgttgttctcaagaaaagtaacgtaggaaaatagaatagagagtgaagcaaggagcctgagtgtggcctgtgcttggacagaagcaaagcctggggaggctggaaggtgagcgctggctggagaggaaggagagagcggtgcgagggaggggcctgcaggggggcagcctgttcatagagccttagctttgactctgaagaagacggaaaggcattggaggatggcgagcggagaagaaacacaagctgccctaggtcctaacaagattgctcttcctgttctgcggagaggatctgtgctggaggggatgtgagtgaaagaccagatgggaggtgagcacagcttcaggagagagactgtgtgaacttccacagggcggctgaggtgaaggagctccatgtgcagattctggatatatttttaaggtagaattggtgggacatgttgatgtgttaaatattgagtgttttatggattgaatgtttgtgccttctcctccctaaaaaaatcctctatactgaaatcccaatacacactgtgatgtttctaggagggggttgctttgagaagtgatcaggctatgagggtggagccctcatgaatgggacctgtgtccttataaaagagaccccagacagctctctctttccaccatgtgaggttataacgagaagatagctgtcagtgcccagaagcaagccctcactatgctggcaccctgatagtggacttccagcttccagggctgtgagaaataagttcttattgttttattagccactcaggctatggcactttcttacagtagcaggaacaaactatgacaggctgtaagatataaaaggaaagtcaaagataaaactaggaattttggcctaagcaacaagaagaatgaacttgtcatccaagacgataggaaagactgaaggaggaaaaggttggcagggagtttgagtgggtggtagaggtatgacaatctagagaccctggaggttagtttttgacaagttaagtttggaaaacctgttagacattcaaacagagatgtcatgtaggcagttgaatgcacaagtttggatttcaggagattgttcagggctaaatgtatatttgtggttgtcctcagcatatatatggtattaaaatatcctgaagctggatgaggccacccaggggtacagtaaagacagagaactaagagattcagaactgagctctgagaaatccggtatttaggtattggacgatgagaattcagcgaaataaaaatattagggaaaaatgcagggattgtggtagatgcccctgggtccaagtgaagaaacagtttttaaaaaggatagtgaaacctactttaaccattgaatttgtttatttatttatttatttgtatttatttatttatttttatgtggagacagagtctcactcttgcccaggctggagtgccatggtgcgatctcagctcactgtaacctctgcctccagggttcaagtgattctcctgcctcagcctcccgagtagctgggattacaggtgcctgccaccatgcctggttaatttttgtatttttagtaaagacggggttttgccccaacactttggcaagccgaggtgggcagatcacctgaggtcaggggttcaagaccagcctaaccattgaatgtattatggtagaagtcatcagtgtcattgttaagggaattttggtaaaataatagatatgtgtcatggactaaatacttatattttctaaaatttatatattgaaaacttaaccaccaatgggctggaatggaagtaaattatataatataaagctattagcatgtgtatgtctgctgatagaaatagtccaatagaaaaagacagctgaggaagtaggaagggacaaccacaggaggcaggaaacaggatccagagcacaggtggaggctcaatctatacaaaccaaggtggctgtccattccaaataaaggaaggaaacatacttgtcttggtaggtatggtggcatgggtgcgtgcacactctcttttgatggcaaccacattcttagcaaaatagcagcaagtcaagaacgaggagagacaggaaagataggagatctgaagatcattttattgaattttgcttatgcatacataactatttgtctagcaatggatttgaatattctgtacaaatccacgtacgatattttaatgaaaaaagaaaataagagatgataacctactgaaacaaaaatcctgacctactgacaaatacttgccttggcaatacagaacattctttgtaaagaaaacctttttttttttttgagacagagtctcactctgtcgcccaggctggtgtgcaatgtgtgcaatggcatttaccccacccttccaccaaaggcattccaggtctgccttctgggtattaacacggtatattttctatgtttctgaatggataatctacattaattttatgggtaacataatctacccagaggctgcagcaactcacaagttgttcggaggatagaagataaaatattatcaagtggtgtctcttcaaaatgtgatcatgaacaaaccggaacaagaacaggtttgttcaagatcaagaacaaaagctgatcatggctaagtctctcatttgggtcaaaatccaacctcccctgtccctttctttaccaaacacagttcctctatcttccatcattctatatctccttattttattctttgtggcctctggctgtatttttggtttactcctttcctgcccggggtgtccactcctccagcggtggtgagactctgctcctgagatgctctgaatgcttctaagtctctctaaacactgccaccagccccagatccatctacagcagggtgctgcagtgtgggtgagagtcagaaacttgattataagtgcttagagaccactagataaaatccacaaaccttgaggagatttcagtcaaatactaaattcattgtctttgtactggtggaccagaggcagaggatctgcatatggtaagagtctccatttacttagcacctttttgttgtttttagtccaggaaagcattttacatcagtgatctcatgtaatcttcactccaatttcaagaaataggaattattagccccattttccaaatgaggaaactgaaattctgagaacttggccaaggtcagggagctattgagtggcagaactggaatttaaccaagttccgtcggcatccaaagccctatgctcataatcacagcttattttctgcatctatgagacctccactgaactgctgtttattcaggctatgtgtgtgaaagaaaagtgccagtcaatacttgaattgcttaaggtggagagtccaccatttctgtttctcagcacatgtgcttataactgttagtgaggagaaaccagtcttcacaaaagcaaagcccaataacactatctctgcatttcagtgggcagattgggaattagacacatggtctaatcaacccacatgcacacacagtatttaaaaggcatgcgatactacagaacaatgcttctctagagacaggatgttggcaacaaacaagatgctaaatagttgaaccaaaggacccacagacacaaaagcaggcttgggtgtgatcaagcatgacatgtgcatggggaggagtgtttttgtgcagtttggatgatagattggttgtgctaattaattgtgtattttgaagtttgttgccacttcacaccaagcatccccttaaaataaataaaaaaaaaaaattaaaagagagagagagagaagcaaaacaaaaaacctaatctaatattcaacaaacattctgcacccaaacagcacatctttgtctgaaaccttagttccaggaaccacttacaggctttcatcaacacattataatattaatcaagactcataatgcagagtgatttgcatgccaacaaatatatttacactgtaaattgtttgttgaggagccttggagagaaatgcaattcactgccatagaactgaatcataaggaaaatcccccactaaaatccagagaaaataaagaatctgtagaagttgatcctctagagccttgagtaaaagatttgttagcatgccatccaaatccttacaaagaatttagctcccaacctactcaatgttgttttttttttttaattagtttcactataagtttggatggccttttctctttctccttttactggcatagcttttagaattggtgccacaattacagctttaactgggagaagatagattgaaggatagatagatgatatataaaagacaggcctccttcctgataagcgcctgaggaattttaggtctctcagttggctcttgttgagtccaccttctaaacaatttgtccacttcttcattcccatctccactattgtaatcatagccactaatcttatccttcctggattactgcaatagctgccttactggctctttacatccaatcttgatttgttttttttggtgtaataatttatagcacccaaattcagtatagttgataggagatgagtttgtgtgataaattccatggtcaccttcctcaggaggctttgcactctggccccacaagccctccattcactactccccctccctatctgactttctgacatcactcacagaggccatactccttcctggctcccagtctatcttagagaccctactgatacattctcccagcactctgtacttccatttcagagcacttatcccagtaagcaattaaataataatttaattcatttaatttgaagtgtatctccctcattctgattcattttcataatgtattcctgaattatgagagttgcgaagtccaagaacaatatactaggagagtgctgatgaaaatataattgtcttcctttattttggcaaatataaatttagtgtccattgtatgcaagtactgtttagctagttagccagctagctggctacatacctacatacatacatatctggatctaaatctaaatctaaatagatgtgtacccattattgcacatatatagatagatatggataataggtagacagacagataatagacagacttacatatacatatctgcctgtcaatctgcatagtgcagtgatgggtatacataggaactgtgggtctcagttgaggaagaggtcatttcaggtggtaagatcagtgaaaacttcctctggaggaagtgaaactggaaagaggactcaaataatctattgtttaaccaccagcccatcaagattatttccactgagccaaaatatattacaggcacaatgggggaaaatgatcctttagctcccaggtgtctttggttttgcatttacctctctcttcctgggatctgttaccatcatgcacatcaactttaattttatctcctagcaggcaaagaaagaggcatgttaagtggtaagtggaaagaagacctagtcagagttacaaccaacttctgcatatgcattcaaccagcaggcatccattaaggtctactgtgcctgggctgagagtgccagctccactaagggaagggaagccagcagggtgcagctgcagggcacagagcaggtagaaagtcagcccttcagcatcagcctccaacagtaagaggtgtttcagaagccacaaagactaataaggtactgctcttgtatttaagcgacttactccatgatatggtttggctgtgtccccacccaaatctcatcttgaattctgatgtgttgtggagggacccgatgggagtttattgaatcatggggataagtctttcctgtgctattctcatgataatgaataagtctcacaagatctgacggtttttaaaagaggagctcccctgcagaagctctctctctctttgcttgctgccatctatgtaagatgtgacttgctcttacttaccttccaccatgattgtgaggcttcccagccacatggaactgtaagtccaattaaacatctttttttttaattgcccagtctcagatacatctttatcagcagaatgaaaacagactaatacattccatcacaaagaaacagcctaaagaagtaggcaccatgtcacataatgagaactgggagattctcctgagaaagaggataaggggtgatagggggaccacagagtaagtgactaagggaggggcaggctcagaaatggcttcaaaattaatgtgaccatgagctgagtttggaatgtcagtggctgtcagagtgatgctagaaagggtgatgtgctgggtgaaaggaagacctcaagcaaagacattggaaatgacttggctagtttctggaaatcaagcagttcagaataaggaagttcaactaaagattcatccacagtgttctaggggtgggatgcatgggagggaaagaaatctgctgaagaagtggggctgaagaccaagccttgacaagctttgtaccacactaatgtgtattcgaaagtttccttacagacaaatgtatgtttagaaaatttgtaattaaaaactcaaatatatagaaaatttgaaatcagtgtaagattgaaccatagaaaactactgtttttaggtcaaaatggtctaatattgacaatttcctatggttcaacctaaatataagaaagactcctgtatcttcatgtagattgagcaattgctaatattttgccatatttgcttcatctttcttcttgcaatattttaaagttaattacacccactatggcatctctttcataaatatttaatatatacctttacaaattatatatgtttctacagaaacacaatatggtcctcatgcttaatataatcaacaaacattcctttacatcacccaatactcagctgacagatattcaaatttctccagttttttaaaacatgtattttacacctgatttattcaaacttggatcctatcaagaaccatatattgcacgtggttgctatatttcttacataaaagatgtctttaaaagagtagttgcaggcaaagccattcgggctatgttttacctataaaattatgaccttaatatattctaagtgaaaaaataatttgtgtggttcatggattcatttctgtaataagaatcatatatagtcaaagtctgctcatatttttagttaggtaaactgaggtatggaacggttacttgctttgctatagctcacacagtttgtcattaatatgtcaccattttataagtcctttacagtcaaaataaagccacaaccaccaacaaagcaacaacacaggtatatattactgagttacagttttctacacatctccagagtgtggctaatgctggtgaggagcacaccaccccttgacaagagtgatgtggcctcggaacaggtgtgccacacagcaagtggctgacagcttatcttgcaaaaggaagtctgtccagctgctaggaaaatgcaggaaacaccatgtcccctgtctactctgtcctcaggatcatagaaatgggctgtaagaaaccctgctaggggcagcctacttgcagtcagttgctgtgctccaaactcaactcatgacctcctgaccagggtggtgacggctgtgcagttgaatcatgagttgtataagtcaattaaatgcatgttataagagtactaattttatgtatacgcctacaagagggtgtgccttcttcccgagttcttgaaatactcggatgctagtgatgctcccaacactaaacactctgagtagaatcattagtggggcaccaagggagaagtgattagaagatgagaaataactgaagacgtggaactaagagatggtatttctgaatgctaaggtaacagggtttcttggcagcaaaaacaaacagagacatatgatgagcatgtaaattatcaggcgtacatttcctttcataatacattgtcaaaatcatcatcatcaacatctttgccatgttgctcctaggtgcgactgtgttaacatttagcactaaggagagctcctaaaagagtaactcatttacttcataacctgtttattgtgtttcatgcatataatattgtgtttggtagcatgagaaatataatgataaacatatttatggctcatgtagaaatcaaaactatacctccgaaatgaggctccaaaatattggaaattggctaagtaacttctatgttaattaactcgaatataatttatagaatgccgtactaagaaccagaatctgttcaaggtcttcttttttctttttctttttttattatactttaagttctgggatacatgtgcagaacgtgcaggtttgttacataggcaaacatgtgccatggtggtttgctgcacccatcaacccatcatctacattgggtatttctcctaatgctattcctacccttgctccccaccccctgacaggccctgatgtgtgatgttcccctcccatatgttctcattgttcatatgtgcccatatgttctcattgttcaactcccacttatgagtgagaacatgcggtgtttggttttctgttcctgtgttagtttgctgagaataatggtttccagcttcatccatgtccctccaaaggacatgaactcatcctttttcatggctacatagtattccatggtgcatatgtgccacatgttctttatccagtctatcattgatgggcatttgggttggttccaactctttgctattgtgaacagtgctacaataaacatatgtgtgcatgtgtctttatagtagaatgatacataatactttgggtatatacccagtaattggattgctgggtcaaatggtacttctggttctagatccttgaggaatcaccacactgccttccacaatggctgaactaatttacagtcccaccaacattgtaaaagcgttcctatttctccacatcctctccagcatccgttgtttcctgactttttaatgattgccattctaactggtgtgagatggtatctcattgtggttttgatttgcgtttctctaatgaccagtgatgatgagctttttttcatatgttttttagccgcataaatgtcttcttttgagaagtgtctgttcatatcctttgcccactttttgatgttgttgtttttttcttgtaaaattgtttaagttccttgtagattcgggatattagcctgttgtcagataaatagattgcaaaaattttctcccattctgtaggttgcctgttcactctgatgacagtttcttttgctgtgcagaaactctttagtttaattagattccatttgtcaattttgacttttgttgccactgcttttggtgttttagtcatgaagtctttgtccatgcctatgtcctgaatggtattgcctagtttttcttctaggtttttttatggttttagttcttacatttgagtctttaattcgtcttgagttaatctttgtataaggtataaagaaggagtccagtttcaattttctgcatatggctagccagttttcccaacaccatttattaaatagggaatcctttccccattgcttgtttttgtcaggtttgtcaaagatcagatggttatggctgtgtggtgttatttctgagggctctgttctgttctgttccattggtctatatatctgttttggtgccagtaccatgctattttggttactgtagccttctagtatagtttgaagtcaggtaacgtgatgcctccaactttgttctttttgcttaggattgtcttggctgtacggcctcttctttggttccatatgaaatttaaagtagttttttctaattctgtgaagaaagtcaatggtagcttaaggagaatagtattgaatctataaattactttgggcagtatggccattttcacaatattgattcttcctatccatgagcatggaatgattttccgtttgtgtcctctcttatttccttgagcagtggtttgtagttcttcttgaagaagtccttcatatcccctgtaagttggattcctaggtattttattctctttgtagctattgtgaatgggagttcactcgtgatttggctctctgtttatctgttattggtgtataggaatgcttgtggtttttgcacattgattttgtatcctgagactttgctgaagttgcttatcagcttaaggagtttttgggcttaaacaatggtgttttctaaatacacaatcatgtcatctgcaaacggagacattttgacttcttctcttcctatttgaataccctttatttcttgctcttgcctgattgtcctggccagaacttccaatactatgttaaataggagtgatgagagagggcatccttgtcttgtgccagttttcaaagggaatgtttccatcttttgcccattcagtatgatattggttgtgggtttgtcataaaccgcttttattattttgagatacacttcatcaatacctagtttattgagtgtttttagcatgaaagggggttgaattttgtcaaaggccttttctgcatctattgaaataatcatgtggttttgtcattggttctgtttatgtgatgggttacatttattgatttgtgtatgttgaaccagccttgcataccagggatgaaaccgacttgatcatggtgggtaagctttttgatgtgctgctggattcagtttgccagtattttattgaggattttcgcatcgatgttcatcagggatattggcctgaaattttctttttttgttgcgtctctgccaggttttggtatcaggatgatgctggcctcataaaatgagttagtgaggagtctctctttttctattgtttggaatagttttagaagaaattgtaccagctcctctttgcacctctggtagaatttggctgataatctgtctggtcctgggctttttttggttagtaggctattaattagtgtctcaatttcagaacttgttattggcctattcagggatttgattacttccgggattagtcttgggagggtgtatgtgtccaagaatttatccatttcttctagattttctagtttatttgtgtagaggtgtttataatattttctgatggtagtttgtgtttctttgggatcagtggtgatatcccctttatcatttttattgtctttttgattcttctctcttttcttccttattagtctggctagcaatctatctattttgttaatcttttctaaaaggcagttcctggattcattgattttttgaagggtttttcgtgtctctattttcttcagttctactctgatcttagtcatttcttgccttctgctagctttggaatttgtttgctcttgcttccctagttcttttaattgtgatatgagggtgccaattttagatctttcccgctttctcatgtgggaatttaatgctataaatttccctctaaacactgctttagctgtgtcccagagattctggtatcttgtgtctttgttctcattggtttcaaagaacttacttatttcttccttaatttttttatctacccagtagtcattcaggagcaggttgttcagtttctatgtagttgtgcagttttgagtgagtttcttaatcctgagttctaatttgattgcactgtggtctgagagactgttgattatgatttccattctttcacatttgctgaggagtgttttacttccaattatgaggtgaattttagaagaagtgctatgtggtgctgagaagaatgtatattctgttgatttggggtggagagttctatagatgtctatgaggtccacttagtccagagctgagttcaagtcctgaatatttttgttaattttctgtctcattgatctgtctaatattgacagtcgagtgttaaagtctccccctcttattgtgtgggagtctgagtctctttggaggtctctaagaacttgctttattaatttgagtgctcctgtattgggtgcatatatatttaggatagttagctcttcttgttgcattgattcctttaccattatgtaatgcccttctttttttttttttttatctttgttggtttaaagtcttttttatcagagactaggattgcaacatttgcttttttttttcttttcattttcttggcgatattcctccatccctatattttgagcctatgtgtgtctttgcacgtgagttgggtctcttgaatacagcacactgatgggtcttgactctatccaatttgccagtctgtgtcttttaattggggcatttatcctgtttacatttaagattaatattgttatgtgtgaatttgatcctgtcattatgatgctaactggttattttgcccattagttgatgcagtttctttacagtgtcgatggcctttatattttggtatgtttgtgcagtggctggtaccagtttttcctttccatatttagtgcttccttcaggagctcttgtaaggcaggcctggtggtgacaaaatccctagcatttgcttgtctgtaaaggattttatttgtcctttgcttatgaagcttagtttggtgggatatgaaattctgggttgaaaattcttttctttaagaatgttgaatattggcccccactctcttctggcttgtagggtttctccagagagatctgctgttagtctgatgagcttccctttgtgagtaacctggcctttctctctggctgcgcttaactttttttttttttttttttcatttcaaccttggtaaatctggtgattatgtgtcttagggttgctctcctcaaggagtatctttgtggtgttctctgtatttccttaatgtgaatgttggcctgtcttgctaggttggggaagttctactggatgatatcacgaagtgtgttttccaacttggttccattttccccgtcagtttcatatacacctatcaaacgtaggtttactgttttcacatagtcccttatttcttggaggctttgttcattcctttttattcttttttctctaatcttgtcttaacgctttatttcattaagttgatctttggtctctgatatcttttcttctgcttgatcgattcagctatcgatacttgtgtatgcttcacgaagttctcgtactgtgtttttcggctccatcacatcatttatcttcttctcttaactggttattctagttagcagttcccgtaaccttttatcaaggttcttagcttccttgcattgggttagaacatgctcctttagctcggaagagtttgttattacccaccttctgaagcctacttctgtcaattgatcaaactcattctccatccagttttgttccattgctggtgaggagttgtgggcctttggaggagaagaggcattctggtttttggaatattcagcctttttgcactggtttttcctcatcttcatggatttatctacctctggtctttgatgttggtgacctttggatgggtttttgcgtgggtgtcttttttgttgatgttgatgctctcgctttctgtttgttagttttccttctaacagtcaggcccctcttctgcaggtctgctggagtttgctggaggtccactccagaccctgtttccctgggtatcatcagcgggagctgcagaacagcgaagattgctgcctgctccttcctctggaagcttcatcccaaaggggcacctgccaagatgccagctggagctctcctgtatgaggtgtctttcaacccctgctgggagttgtctcccagacaggaggcatgggggtcagggacccacttgaggggcagtctgtcccttagcagagcctgagccctgtcctgggacatccgcctctctcctcagacctggcaggcaggaacgtttaagtctgatgaagctgcacccatagctgctctttcccccaggtgctctgtcccagggagatgggagttttatctgtaagaccctgactggggctgctgcctttctttcagaaatgccctgcccagagaggaggaatctagagaggcagtctggctacagcgactttgccacattgcagtgggttccacaccaagttcgaacttcctggtggctttgtttacactgtgaggggaaaaccacctattcaagcctcagtaatggtggatgcccgtccccccaccaagctcgagagtcctaggtcaacttcagactactgtgctggcagcgaaaatttcaacccagtgaatcatagctttttgggctccgtgggggtgggatctgctgagcaagcccactcggctccctggcttcagccccctttccaggggagttaatggttctgtctcactggtgttccacgtgccactgaggtacaaaaaaatacacctgcagctagctcggtgcctgcccaaagagccgcccagttttgtccttgaaacccagggccctggtggtgtaggcacctgaaagaatctcctggtctgtgggttgcgaagaacatgggaaaagcgtagtatctgggccagatagcaccatccctcatgtcacagtccctcatggcttcccttggctaggggagggagttccctgaacccttgtgcttcccgggtgaggcgacaccctaccctgcttctgctcaccctccatgggctgcacccattgtctaaccagtcccaatgagatgaactgggtacctcagttggaaatgcagaaatgacctgcgttctgtgttggtcttgctggcagctgcagaccaaagctgtttctattcggccatcttgccaggcccccattattcaaggcctttacattgattaagtcatttaatctactcaatactaatttcattttagtaatagtactaattatacatattaatatattacaggaggaatttgagatccagagcaattgggacaatttcttgaggttaacagctagtaagtgggggagttaagattgcacccacatttgcctaatttgaaaagtgacgctctttccactatgcgttgtggcttcttatgatcaaaatgttcttttaaatgagaagtccaggaaaagctatctgggggcatcttcagggagatactattagtgatgcatagaatgactacatctgatgtaatgagttgtaaacatctgaaaggagctactgattaatacagaagaagaggggtagaaaaagaacgcagacagacacagtgctgctggaatgtcccaggtttctgtgtggcagagccctggagagtgctcttggtgttgtccatgcggccctgcctagctaagcacaggagctgtcactcctcggaaggtggccacaccaagctgctctctcactggctcctgctgagccatgccttccccgctttcattccgcatcttaccacaaagagaactcattttgctcacaaacactagaactcaatgataaataaatcaacttgtgaatatgaaggcaaccacgttctggcctcagaagccttgctttgcctgacgactaccagggctccctctaggcctcaaaggcattatgccagtcaccttatggaaatttaagtgagtatgttgagatgttctttaagctgctgggtagctgatcagcaggaggcattgatctcccagcacagagatgttccaaagaggaaaaaggaaaataattagaaaatcaaagaaatgcctattaccagctccgctgtggtcataagctttgaaataaggagttagcactaagatgcctgtggctcagggctggccagaaagtggaagtatagagtgggtgaggttttgtgttcatccttcctcccaccccaccattgctgctcaccgcccaacccaacaagtgcatgcacagcctgtgagcctttcctcatgggcctactcatcctacctgctggggaagtaatcttccctaagattggtggcattccctgaaactggtgactaactgcatgactgcagagagaagacctggttttagacgttattttccatgtatgagctgtgggatatggcttaacctccggggatcaggttccccactcataacatgttgataccaatacctactttataaggttatcatgagaatcaaactagataatgcatgtaaatccctcatcataaaacccagcacatagtaagaattcaggagatagaagtattttctcactcctccctgtgtttccatggaggacctctgttccactgagcagaagaaagccagattggatgagcacatctgttagctctttgagcctctcattcactcctctccaatgcaggggaagtggctttgctgactagtaagagtctgcctttcctcaggctccatgtaaggacaattaagctcaaatatgatctggtattttccctgtgctctgcaaaattcacattctagcaaggtaacctgtttcattgctctaccagggcttgtgcacagccggcatagctcaggcagagcctcacgcctgcctctgacactgtcctcaaagcctctttgatttcccccttgcatttgattgggtaagacacattcctcccctcagaaggtaggcatgagggagctagcgttcgttttgctgacccagcctctccccaagaaaggccacaggatctagatatgatgatggtggtggcaggaggcctaagatgcatctgacaagactgtacggctctagagccctgggtttcagggtagtaaagtccttactggactttgacctcatccacagtcttgtttctgttcttagttgccacagggcttcaagaggagggctaatgtgagtaataagtaaacaagacgtcgtcagtgagtacaatctgtaacataattacaagtattaaaatctcatatttttattatccgaaacattccctaaaggagaagttctcccaggaactttggaaatttaatgcgagatttctagacctgtgacattatcaaccacgaggcatgagaatctatggtggctctccatgtaaataccgatggcacggcttcctgttatttccatctcttaattcctgatatgagcagattcttacctgtttgctcctgaatttagccctgaggacaatcttttcttcttagctatcagaacaagaacactggagttgattatctttctaagctcagatagaagcagagtccaaatctataacagtctttttcatcaatgaggaatatgagtgtgatggtgatggcaggaaggtaaaagaaggaaaatatcccagaaatagatttggaaaaatatcttgtgtctccctatttctgctttctagagacagtgatgccctagcagtattgaaaacagctagcaccttgatcttggttcctaaataccatccactactcaagagaactaggttttcttggagacaggcttgacttcaggactggaaagagaaggcagaagtgcgtctaaaatgttctgtcatgccagagagaaagaaaatgtgcaaaaaataatgagcacacatcaaaatagcacagggccagcttgatgggacactatctggccaaatctaggacaaatgaaatcaaaacaaataacataaattgattataatctgttgaatagaataaaatgtcatggtcccatgcttataatttaaaaaaaaaaaactaaataaatgttgtaaaggggaaagttcttccttacataaatatgtcaactaataactatataaggaatgatggcatcagggaaaaaaagccagcatcatgcatccgtaccagtgacaaccagctcaggtgagaattatcaaaggctgctacacagaaattcaatgaaggaaagttatttacatagtctcaaaatgtctttccagcaattacttactaatctcagaaaaatggtaacattaaagtggagaatcctggcagatacttccttaaccaagtgatcattgctagcatcaccaatactgagacatgccaacagcatgccctcctaccatgaactttcatgtatatggtattcctgcccataaatgtataacctgagtccaggacatatcagacaaactcttctcctggaacctcacatagtagaaggggcagaagtctctgttgagacccttttataagggtactaaccccatcatcaattgtccaccctcatgacctgatcacctcccaaagccaccacctcctgacccctcacactgaggattaggattttagtatgtattttggggtatacaaacatttcagaccatggcagggacaatgccttgacagaagaaggctaaaaccattaaaaaaaaatgacaaccagatgcattgtgtgatctggtaccagatccaagatggaagaaaaataaaagatattactagcaaaaatggaaaattctgaataataactgcatattatatgatgttgtataaacgttaaatatcctttcgtaattgtaagagaatatcttgttcttaacataaacacatggaagtgttggagaaaagggttatgatgtttgcagctatatctgaaatggtcagaaaaatattgattcacacagatatgtacattatctatgtttatctatctatctatctacccatctctccattcctagaaatgatgataaaacaaatgtgatgaaatattaacagtaggcaaatctttcagggggttagtgagtgcttttgtactattctggaaatttttctataagtgtgaaattattttaaggtaaaaagctaaaaaggagtttatatatgtagactatttacagttacaagagcagccaaacatattagtttattcgaccttcattaaggagccctgggtggtgtgtgtgtgcacgcacacatgtgtatatgcatgctcacgtgtgttagtaatagccttattttacacatgagtaaactgaagctctgagaggttatgggatttctttgaggtcaataactaatattagcacagaaattcagaaaccatgagtccacctgaagccggcaccaaaagttcttcactaattccttctgaacttccatttagccgacatactgcattacccagacttctccactctctggcagtcatggggactgacttccatagtgtgctgaattcccagtctatgccatttgctccctctggcttacccaggtgctcatgcgtttactagttgagccatatgcttaccaagagtcagctgcatcatttccaaactctgtgcttaccaggtgtacttgttcacttaattacataatttacctaaaaccctcacaaactggtacaatctgagtgtaaaaagagaattgtcatttctatgaaaactaagtagaatattttagaaatattcaatataatagcttggaaaaaaaaaaccctcctgcagttgaattaaatatgggggaaaaacctagtagggatggggagaaatcatagagtctagaaatattttatactcagataggttcacattaggaaccttcaccctcatgctcgactttaaagaaattcaaagtagaaatcaagagtgatactgtcagaatattgtctattcaaggagacaccagtttccagtcagcagacacagtctcaaagagatggtgttgacccagtgtcagaagtcaaacaaaggtacacgtacacgctgtggtatatttacaagtcttctccatggctgcttttgaaacaccagtgtactcagctttttcttgtaacaaggtacctgcttattctattggagacgcgtaaagggcttctattcattgttctgattttagactattcccagttccctacagctccaccctgcccagtttagattctataaccatccaaaagaccatctatgattcagaactggtgaatggcttgcccccattccgtcgatctctacatgacactatcaactgatatgcagtaggacatggagtgattcatttaactcctccccctgcctccagaccactgaactatccatcgtccaaaatatgagctcagttaaagcaacatgggaagcattgaggcttctacaatttgggtactgtccattaaaataatacatctacatatatctacactgagtgctctcattatttaaactgggaaacaattaatgtgtgtagctatcatttacaaaccattcggtctccgaatgcttgcaatagatttactctcagtgttactctgacctggtgacctagaaaatgtccaagagaaggtaagtcatttaaaggaggaaacaatgccactatctcctttcacactcattgctgcttgaataaaagaaggaaaacgaagcatacaccctctgctctgagtgccagccaggcccccagcaaggagacccgggctccccaggtgaagttccttaaatcttacattgctgcccctcgccaagcccacaggtaggtgaaagcagtgggtggtgggaagaagcgggaggagaaagtgggacacagatgaaaggagcactttatttgataaaatcgtaaagagcagcttgtactgtagagcaagaatctccaagtaataaatgtcaggtttatgaacaattgagcctctcctttcctgactgaaattgctctttgaggtcagctctgtaagtgctctgtgaggtgaggaggctgcgctgctgagggggtttgaggtcgctgatgcaccactgggaacgggaaagggggtgtgggggtgtgggggtattgggtttgcccattgtgttattagggtctacactgaaagaagtgataactatgctgagtagtttttttgtatttttttgttttttggtttgtttgttgttttttttttttgagacggagtctcgctctgttgcccaggctggagtgcagtggtgcgatcttggctcactccaagttccaccttccaggttcacgccattctcctgcctcatatgctgagtagttttaataaagaaaagcatccagacatccccacaaacaagactttgtgactggagcctcagtaaggggtcactgaactccagaaccacactcactcaacaagacaaagtaccttcctcaacaccaggctgctgaaccctcccatagctcacacacagctgcccattgtcaaaaacaaaagcaatgagtgagatggaattctcttttcaatatctgctcctaccctcaaagtagacgctgcctttgggtgggccagtccagtagcataaccaaggaatgtaaatcctcagcatgtaaaggcggggtggaaagaagccacagacacgcatgtgggagactcgcgcacccacaccaaagctgacttcgatgcttaaaggtcgaagcaccggacccctcttcttttatctctgtggtagagacaaacacaacttacatctcatttcctcatgatctacagtgaaagaaagtgagtggaatacaggttataggcatttacaagattccagtccattgagaccttgcacatgggaacacaacagcatctcttcaaatgcaattttgaagatgttcacacaggcatcatggggagaagactggaaggaatgctctgcaccctggggttgtgtgctgagtgcgactctggggaaggtaaggaaatgacagccagtgttaaatgattctgaagcaagatccttcagatttcatatagggaggtattattagaggaaagaaaaaaaataagaatttcagcttttattatcaaatatcgcataattattcagaagtcaacaaataacttgttgaacacttactgggtcccaaacacttgtcttaaatgctggggataccgcactaccaaacagacacgaattcctgctctcatggaacttgtgtttttgttgagtgtgtttagttttgttatatccttgctgaaaagatagcaaatatttgaagttagttagttagttttgtgctggagcaattgtctccagaataaggaaggaaggacagaggggaggaagggagagaggaggaaagacacggagggagggaaaaagcaagggatggaggaaaaacaagaaatagatactgaggtacattttgactttctcaaatggtctcttcccaacttccccaggtttacttccttggaagcacacagaaataataagcctttcatgggagaactaatttcccacctgattttcctaccaggtggctaagtcacaggtgtttaagtcacatgctttcaggttaggcttaaaaaaaatacctccccctggagctgctaagccaaggagtcctctgctcctcattgtgccattcgactctgtggccattagaaacacgtttctgaggagcctactggaagcacgggcagctggaattgaactggcaactgcagaaagaagcctgtggcaaaaattagggcaagaaagaattggagaaggggggactcagggggcccagtgactgacgcaataggaagcagggatgatgagcggttctgtgagttgatttgtatttcccggggttaaggcagcagggccttgatagaccatatggtctggccttgacccttaaatctctgcctgcccagagagcagcagccctcactgtagctggcttccacctcttgttattcttggcactaggagtcctgatcgcagggtagttcagtatcataatccaaagaattagatagaaaccatctggaagagcaaccaactttaaccttgagggctatgtgaaaataaccttcatccactgagccctttgttcacatggaaaaataggttagttagagcatatttcaaaaagcaccagggtcttgggagccatccacctcagaagagaacaacatttaaccactatgctttgatatctatacaatgcattttttcccatctgcttagtgccaaatttcctgtttcttgcacgatggggattcaataaacagggccaagaaggtaacaaagctcactgcaggatgctaagcaatagaaagcagagaggccacgcctgtaataaatcaattagccgattattcagcagaggaaatgcagttaaatagaccagtgacttactatggactctgaaggcacaaaaaggaataggtgagaatgcaagacaagcaattaatcctattatccttgtttatttgttatgtttaggctcctgagagcccccacgaggctcccaccacactcatttatatctaaggaagtctgcatggcacggttcacacacacagctcttgtcagcataagtttattccctagtgaagttgtgagacttcatcaattaacaatatcagagaggaaatgtaattctccaaaaagccacagagtcagtcaatgaaaacgcacagcatataaactcagagttctctgacttaattgcccagactgcgattctgcacaagaaaccatctctcttcaaggtgactcttcaggaaggagttttgtgctgttagaaaaaaagtgttacatctcatctctatttaactccacatgagccaggagctaacgcggcctcttcttgtaaatgaagcataactgggctcagtcgggcaggatgttagagcagctcaggaaggagccaggaatagtccctctgttctctggattggggccatgcagcccaaagcccagagtttaccttgggcacggccattgtagggtaaatgccatcttctgaaacactggttcttaggtccaaaatgcctccactgtcttcagtattgggaaatgaaatactggggaagataagatagtaagacaataactcatcttttctgccacctgatctagcaaaaagaggaagagtaaataactagcaactactattttttgccaaaatccttctctgggatggtcaggaccttgctaccaaagctctcatttctaaaattgcaccctagtcataaacaccctggaaagtatatgaaaaaatcacacaccaaaatggtcccgtgcacatgctggcgacgaatagtcacatatacactgggaaagtgtgcagctccttggtgaaaatgtaggaccctatttgagaacctgggatttcaggatcctggtggaaacagcatgccttccagggactggccatagcctttggtagccagttgggaacctttgtatgaatggaaggagggcacttattcctccaggacatcacagtcacggtgggtccgggagcagggctgcacaagggcctgtgctcagtggcctcagggtcctgggaagtggagggctcagtgggctaacttcaggcctcctctatcctcttctcacccctgtacaataagagcacgctatccatttcacatagtgaggttgtcaatgatattttattttccagaaaatgactccacagcttaaataaaaatgttgaaggccactgtgagctacatctcaaatggcccccgagggatcttttccatggccttagctcacttgcagaagacatctgcatggcccagcaagctccgcggatgcagaggcagagtgtgatcaaagcccagctcagctctcctctggtcgccgaatacctgtctggggcacattggagaggagcaggggacctggtaatagagctgttgttgtcttcctctggtacgaaatcagaattcgagccacagaaataaaactctgaggagtgaaaggaaggtagaactgattggcagggaggggcagagacctagggaggggcagagcgacagacagatagcaacagaggcaccctgagaggtgacatctgatgacacatcctcttttctgagcctgcagcttccttctaggaaggaggccaacataaattcttccactcagcagtgctgagatagacccgaaagaaaacaaaaaggggattaatctccgcattgcaggtgcccctcagccaccctgctaatacccgccttccatggagggtttgatttgaggagggctttgccggtagctgaaataccaaccacaggctctgccctcccccactccccctttcattttatttcaatcaagccgtgtgtctgattgcttcactctggagggctggcagcggtacattaacctgccggctcgcggtgagcaacgtgggctgcaaatgtggctatcaaaggacctcttctgtctctgcaggttcctggtgaggccgacaaaaagcagcaatagaaaagtctcagcatcatggtggcattttcttacctcccaattaaccttcacattggtaaacacgcaatgagctttgtatcgaaaactgtgcctcacccatattctagaagtttcttcactttgaaaatgggcacaatgaacaattcatagaggatgcatttccatcccttctcattcttatatgtcatgtgttcaattctctttctgtatctcctttcttctggatattatcagcctcctctggctgtataatttttatggcctctttttctttgcccatttctgcatgtcccacaatgggttaagtgattccactgagcctaaacatacttagaaacaactctatcaatcaccacaggcgctctgaaagggaagattactgcacatgcacattttaattgagttttgtaaagagagagagagaaaaggctctgtacttagcacccactagtctgcagtcatagcagaatagcaaggatttgactttcaaaaatttcctggtccaaaattatgtcctacaacacagcctgtctgggaagatcgtgtgtcatgctgtcaaattttacctatagtctggctcattttgaacagactgtactctatgtgttaagcttcattggggtccattttaaatgaggcagctcctagaaggttatctgacacatacaaatgcagtgctgatgggttcaaaacacgcagcctggtctaccctgccctgctgttctcatccacacactgaaataattcccacttcttcttaactctattaatttattgctaatgcattaaatcatattctaatggcttagaagcagtaaattacttccccagataccctacatcaacgtacaaagtgttttttttcatcgtacaggctccgaccaataagaatggtcagtgttacaaatgatgaagtgggacatagtgctggaaagccacaagcctcgctctcttttcatctcctgttttaccccagtccacacccaagcccttggagattcttattctgtgcttgcaaagtggtgctaagattcaccatctcaatctcaaaggggctgcatgagcatgttgcacaaaattttagctgcctgaaggtttatttccagaaattagaataactggctcccctctttcctagacatcctcctatcattccctgtcccccttgcaacctcaccatgttcctcactgtctccagcagactgtgcccatcaagacagcgactgccattttctgtgcctccaggactggggtcatcatcagggctgtgcatacagtaggtgattaatacattcttattgattaatacaaatagcatcacactgaccacactgtatttttatttgttgtgtatataccatttatcccaattcactttggagggtgagagccatatcatgtatttctcgtgttttcccccattcagtcccaccaacctggcacaggtgagcatccaggagggactgccgtcagaatgaatatgagagcagttgcctttgtatattacaattgatattttttcttctaactcatggatgatcttgggatattaataagttcttaatttaatcagctgacttgctaagtgaagataaattgttaactggagcagcatctttctggatgctacattacccagctaggcttgggaagcacatcgatgactatggtagctggagcataagagttaaagagctgatttaaagctatcagagctacttgtagttggagctttgcttgatgacactgaaggtttgcttgcttattgagtttgattatttgcattgcgtgattataaggtatatcactcccagaattgatttgatgtgttgtgattgcaacagctttttgttatgtgacctgatagctgattggttcaagtgaacttctctacagaattatctattcctcttccttcaataaccaccaaacacacacacaccaactcactgagaggaacagtgacaaactgcatgcatgtggcatctgacacctgagcctccctggcactctgagataaccttacccctctccagagcaggctgcctgtcgattgccactgtggagcctcctccagtgacgcaatgatgtcctcccactgaagtttctttcaccatccatgttgctgctccttagcacccactaaagtacctcgggtgcctggccctgggcatcctgcagaggctcctagaaaacagcagagctcctcagcctctttcaaagaatgccagcccaaggttccatcgacaggtgtcatatgggacactagctatacttcatggcagaaatgctacctgccacctatgaaccacagaatgctgccccttagatatataagttaaagtacaaagtgacaatatccagaacagtagaggctgtcacatgaccccagtgctttctgtttctttttttagacagcgtcttgttctgtcacccaggctggagtgcagtggtgcgatctcatcactgcaagctttgcctcctgggttccagtgattctcccacctcagcctcccaagtagctgggactacaggcatgcctcaccatgcctggctaagttttgtatttttattaaagacagggtttcacatgttggccaggctggcctagaactcctgtcctcaggtgatccgccagcctcagcctcccaaactgctgtgattataggtgttgagtcaccgcgcccagctgcatcctgtttctttcaggaacatcacccatggtggttttacagcatagctattaacttcatgctaatgcaccttatgtatacataacataacaaaccctggtggtgttatcttttcatttcacaaacgaagactgtagctgtgatatggtttggatgtttgtcctctccaagtctcaccttgaaatgtgattcccagtgttggaggtggggccttttgtgggggctgattggatcatggtgcagatcccttgtgaatggttcagtactatccccctggtgataagtgagttcttactcagttcatgcaagatctgttttttcaaagaatgtagcacttccccctctctctctctcgcccctgcttgggccacatgacatgctggtcccccattgctttccaccatgagtggaagctccctgaggcctcaccagaagcagatgccagcaccacacttcttgtacagcctgcagaaccataagccaatgaaacctcttttctttataaattatccagcatcacatattcctttacagagacacaagaatggactgacacaggcttagagcagttagttaggtaacgtgcccaggaccaagcagctatggagccagcctggatcccaggtcagtgcgagcagttgttgctcatcgctctctgttgcttcctggagaatttccctctatcaaaggccagagggatcactgcattagccccatcatcaccaaaggaacttggggtccacagaggcaaagtaacaagagagagtaatctttagctacaaagctgggaaggcttcccacactacccttctccatgcaccatcaccaaaggagaccttacttctccaactaaattataagctccttaaggactggggctccactttcttaactttgtggtactctctaagaactagcagagcatgacatgcaaagatactcaccagcaaccatgattatttgtgttctaagaaaaagagccccatccaacttacttgctcattccaggaagtgtccaccctagaagatctgtcagtcacatgcacttcctttaaggtggtctgtgtcagggtgttaggacacctagttagaactagttagagcacgcacaaaggaagcttcatgaacattacttttttatgtccaaaacaatgaaaccttgaactgtaaggagggtgaaataaagccagcaggtcctttattggtaaggaactggggtatagagctccagggagcccacagtcattctggggcaggtgccagccacccagtggagttactaatatatgaactttgcctctgctcacccacgctgcctgctgatttttatactatgttgcataattaatctgtcaacattctgtgacagaatataaatattaataataggatcacacagctagctgttccctttaaaattcagcgccaaaaagataaatcggccacttaatcttgctatattccaaaaaggagaggaaagagtggagcaggaggtggagacaggaaggagagggagcgggagaggttgggagctaattgggaacgacggaatccttgtttgaatctggtctcacacctgtaccttcaggctcatgtttaaaggcgcagaccacttcacagctagcttagttctttcattcccacataatgagataaaccttttctctctctttttctttttactcaagggacaaaaagctctcatttttccatctggcattcctcatctctggatcggcatgggcagcagtaaattccaggagagaccttagccaaccatcccctttgtttcctgaaagaagagaggtttatgttctcctggaaggctgaccagcagtaacttagggaagccacaggccagcagcacactgaaatgcagatgtgattagataaacgagggagcaaaggcatgttgtgtcattatagctttacataaactctccttttccaataagctcgccaagtgttctctgttggtatcaatcaaacagctcctaaaaacttacaatttcctaaaactctaccaaattggcctttcagcagtcactgcactggccccaggccacccacactgctgcgtgctagcaagccgccctccaccttctactttacacctccgtttattcaaccaaaaatgtttcttcatcatctacatggcagttggtacgatactaagagacatggaagattaaaaagtaaaaaaatcaaatgcaaatcatgacctcaagaacatataatttagtgtaaagataaaatagcatttactgttatataaagaggaaacttatttgtacagcaagtaaaattcagcagcattttacatccgtgtttttctgtggaattttgcagtctcattctagtaattatattcttgttgtatcttttatttatttgcccatttttactgtcactgtaattttctctctaggacaccaccaacaaataagaatatggaaataaaaactgaaatgggcctttgaggtcatccagttccgcgaagtcatttcacaaatgagaaaatcaaggcctatagaaattaaaagatatgtccaaagtcataggctcaattcgtagaagtattagctctaggcctccccactgcccgacttaatatttcattgccaatataacttttgacaaaaaatataagagaattttaactgaatattccttttttcttattctgatatacgattaataacactgaattacactgaggtggtatatttctttttttttttttttttttttttggagatagagtctttctctgtagtctaggctggagtgcagtggtgccatctccgctcactgcaacctccacctcgggggttcaagtgattcttgtgcctcagcctcctgagtagctgggattacaggcacctgccaccagccccagctcatttttgtatttttaatagacacagggtttcgccatgctggccaggctggcctcgaactcctgacctcaggtgatctgcccacctcagcctcccaaagtgctgggattacaggcatgagtcaccacacctggccttaagttgtatatttctttaacttgaaatgtatcacagcgtatgtcccagtaaaggatctgaagacagtttctctataatattagtcgagataagggaatggcattggtttttcccttactctttatcttaaaatccatagatgggcttctgggggtccctgcactccctgaaactgtgttcatattggaatggaaagccttaagtacttttttgtaggaatgttgtgggaaactcttcaaagattttattatatttttcaagttgtgagtgatgatagatagacagaaggggggcgtggggagagagagagagagataggtaaaagagaggaagaaacttctcagtgctgtatatcaagctgggtgagagctcaggactgcccagactctctgcatgctttcagcctgaatgtgtggccctcccctgcagcagaatgttaatgaggtcggagctccagtctgtgtaatacaaatagggagcagtggcagactttgccaccaactctccatcattttgttttatgggtacagaaatgaaagggatactttagattaagatttgtttaatggtctgattaattcattccaaacagaccgaaactgttctacaattttcttcttgctcttaaccttttcagcttgttttcatggatgctctttcctttcttctttacttatttttttgttgttgttgtttaatttcatatttaggagctgctgctctgattctgacatagatcacatagtgtgtgagaaaaatggaaaagtatgtttatgtgagtgtttcccatgagaagtgggcaaatgcatctaaaatccaaacctgtcatcacaatcctcatcaaaacacatcgtcaggtcttacacaaacaccatggagctcagtcaacaataaagggtcatgcacttctcctgaccctctgtactggacatgagttcatttgcttctggtagtttgcaacattaagcagtggtacagctctctgctccacactgtacgtgagacactgagagggatttgctggttccaatgaatgtgagggaccgtgagtcgcatcagtagtgccaacggtaggaagaccaaggacagcagcttttttgatgggacattcaagggcttctcaccttagcatattaatagtgggttgtttttctattcctcagattttttcagcaatcacctctttcactcccctttccaaacttagtcccctgagaaaatggctaagactattgcttgatgctgtggcatttttgaaagcagatggcaggaaagataccgattaaaaatcactggtttcctcctgcaaatccatgagtccgcaggtttgaattgactcagaataggctgggaggtagaggaatgtaacaggtaaagatttttatgaaaaccagtaagtagtccaggtccatgtgtaaaagggtggccgtgagtgtgtgtcatgaatttagctcattttgcttcttgccacacattggcaagtaggggaggggctgaattatttcatttatatttaaaaatttttaataactaactagttgcaaataacactgtcttcactggtaaacaaatccatatctagtctgtgtattttaaatttctgattacggggacttgtaagcagactcactggggaagtagtatatgcaatacaagttattttaaaaatattgtgaatcatagcaattttccctatttatctatattttatattttttcattgatttatctatgctgtccctttccataaaggatttgaggcaatgtatcaagtactgtctgttagtaataactactttagaaattaacatcaaaatagggcccaagaaggactgggaaagaaacttggaggatgaatttcatgtgtcaagctaatgaggccacagcgtgcccagacatttggtcaaccgttattctgggtgtggctgtgaggtcatttccggataagacaaactctcgaataggtgggctgagtggggcaaagtgagtgccctgcccctcaccatgagtgggccccttccagtcaaccgaagacccaaataggacagaagaactgagtatgagaagacttctcctgcctaactgcttgagccgggacactgggcttttcttgcttttggacttgaactaaaacattagccctccctaggtctcaggatgccaggctttgccaggcttcagactggaatctaaaccatgggctcttcggggtctgcagcttgcccactgtggactgtgggacttctcagcctccatgactgtgtgaaccaattccttataataaatatatgtgggggtgtatatacacccacacacacatacacatatacatacacacacacacacacaccctattttttttttttggtctggaaaactctaatacaataaccatggggtgttcacacctggatgagtcccagtcaaagctgtgactgattatttcttcagaacatagtatcagaagcctatatagaagagaaggcatttgagacacctctttgaaaccagcagaaaaataatctctaggttaaataaacttttaagccagagctcaatacaaatttaacaccctcagagaccagacatacaactaaagtatccaatgacgtcttctatcagtgatagaaatagtcaagatggcttgctgtttctgctatatatatacatatatatatatatatattttttttttttttttttcttgagagagagagagaaggagcagcctgaataatgaagtcatttgattcagagagggctgccacatcttcagtttcatctgcagcccctctcttccactctgagtctctgcaaatgtttgaaatggaggttttatttttccctcagaacagaacctggggttgctgtctgagagagtcagtggtgacaaatcgactcatttaataaaaagatgtgaatgaagtgaggagaggaagcgaacgcaccgagacttaagagctgcaggtgtgtctgcttgtggagccatccctcctgttgccagctgggtttccatggagacagctgggtgcacagagcccaggccagtgcatggccctggcatggcactgcacacccaccacggagctgaattaggctaatgagggccaacttttctgcagtcctcacagtttccatttttcctggtggctgcaggataaatgtttcttagtaaagcgaatgctcagcaatgagagtggccttggccaaaaaaatgctaattctggaaaggcatttaattataataagatgtgatctcacttacacatgagtatggttctggcttctctattcttttttggtcccgctttttggctactggagagattcaggagatataaaatataaatgacttgccaattctgccccaacttctcagaagaataaaaactttctcctgagaattcctcttgttagggatgggaaaatcacttctctcatttctttatgactgtgggtaggctgaagcggagtcatagaaatcatgccgttgtttaatatgtgtgcatatagccacacattgactcgatagacagtaagctatctatgtagatacattatatctctatataaatatatccactatttacatatataattatatataaataactatatataaaatatgtaatatatatatagtgtgtgtatatatatatatatatatatatatatatgtatgtatgtataatccagttgtattttctttactttcagaaagactatagcttcacagagtagagcagaaatctgatttttgcttttagatctgcttttagctcactgtggaagtttgaaaaggtcagttcacctctttgggtgaacctacttattaacattcaaattaagagtttgggaagggtttgtccctacagtctctttcctttctaagtctcaaagtccctatcttcttatgtgaggcaagagagagcaaaagagccagatggggattcggagctgagtagaaacaaggtgaaagtgatcactaaacttggccttatttgccttcatgacttccagagtcacacattttccatgtgacgtgccctttactcttccaatacatgagaccttttgctttagtggggttaagtcatatgcataacagactaatatcccaagggcaataaatgtgacccaggaggccgcatttaaagacacatcataacaatttcacagccatgttcaaacagttaattcttggttttcctaggtggcttgctctttgccaaattttattcttaaataagttaatgtctatcaactaatactttttggagtttcctttctactaaattctccaggaacacacttcaaccacacagttatccttagcaaaaatagaactacatcctaagcaaaaatccaggggggtgaataaagatataatactcccaaaggcatcagtaagtcatttcctaataatatatcctttcaattaatgtaatttaccactctttccctaagtatagaattgttagctaaatgtattaaaaatctaagtgagacaaagtacaaccttaccctagacctcgtgggagaaaaaacatcatgcattaaaacaagctctgaaatcaatttggtctgaaatacctatttagcaactactttgggaatatattttaaaaaatcaatgcaactttattacttttaggtggatatttttatcttaaagaatttttaagtacaggttttagccctcctgatttaatgatcagataggcctgattagcaaacatcatttgtacaataacaattaatacaatagtatcctaaatatactaaatgaataatgaatagactgtatataaaaataaaactttgatctgcaacctgtagcaacctgcccagaaaaccaacccagctatccacagtaacaagcctaggaagccagggtgctataattcaaacttgtaggaagtcagactgctacctctactgacaacactaaaccttgtaacaatttgccttaactaaccaaggcttgattaataactactaacttccctaaattttggacccacttcaaatttaggactaaccagagaaagccaaatacatacccctaaccgatcacacagaatgacttctatctagttagcccatctacctcttctccacagcaccaacttccaatctggcacacctgaagccttccctctttccattataaagcccttccactcctctgcctgcctttgagtctctgccaaaacacaagtgatggtggctgactcacttgctccagcaaactccaagtaaacagtcgctgcttgctctcactggactgatgtgcgatatggttcgaatgctttgtcccccccaccccaatcttatgttgaaatgtgacctccaatgttggacgtgggcctggtgcgaggtgtctgggtcatgggaacagatccctcatgaatgaattgttgctgtcctgatgataatcagtgagttcttgctctattagacctcacatgagatctgttgaaaagagcctggcacctcctgccctctctcttgctcctgctcttgccatgtaatatacctgctcctccttcactttctaccatgattggaagctccctgaggttctcaccagaagcagatgctggcactgtgcttcttatacagtctgcagaaccatgagtcaaataaacctcttttctttataagttaactcagtctcaagtatttcttcataacaatgaagaatggactaacacagtctgtgcttatttccacaatgatacatattttattttcttttacataatactcccagaggttacacactattttgacatcatgcacatataatttatgtgcttagaaaataatttctacctatattgtattacaagaacctgaagttcagtccacatagcattttcacaaataataatgatgaagctgatgtcctatggtgagcatcaaaacaataaactcactatgtgatcagagcacttttcatgtaataacttacgtacttctcagagcagttccaggcaacagggtctgttatgagctctatttatcacatgagggatctacatggtcaagccacttgctcaatctcaccagctagtaagcagcagacacagccttccttaccagcagattgcttctgcatccaagcattttacccttatgaacttggtacaaattgtgacttgaaataagaggaggagcctagaagaagataaatgttgcagaaatatttccataaaatagccacaaatatacttctttctcatttaaaagagataaacaatgacaatcaaaaccagatacaatgcaatgctccctagtaaatatataacaacaacacaaactatctacaggataccaaatcttttaaaaagtcatcagaaggaaaggtcaggtcaatgtcctaatgtcagtaactctgtgcagtagaatcacagggtggctttgtaaggagccacgtgcttaggacccactccagacctctgggatttaaaatacccttgaggagaatgaggcagacaggtgcatcttgtgaaaaagctccacagatacacagatcccaacctacagagggagacctcagatctaaattttccagatatccaggtgaccatttaaactaagcatagagccaatcagttgacattttttaaaaaatattttatccaaggagtttggagaaacacaagattccatgctcagatttccatgtctgatagagctgggttttgcgggcagcctgctgatgtggacaatggcagataatataaacacaggaagcaatatcaaaggttctctttacccatacccatcctccacagcatctcagcaccccgctttccacctccagctgctctccttacagaccagcagggcttgtagaattttccctttgttggatttctctagctttgaaagctttcactatgtggttatcatggaagggaagagtcatgaaaattgtcattaatgaaagtaaataccgttcattaactttagctgtaactcatctaaaagctgaaacgatttcatagttaaagtgctaaccaaaattagccattagagtagaataattaatttaaaattgcacacaatagtacacatttaaggtaaaactaaaacgaaaagaaatgggggaatgatatcaatgccgtagataacttttggataactcaaataaagtaagtgatttcactatcacttctaaagaaaataaatggctttgattctgacctctggcatttcctagtatggttccccttgcctttcttacccacctggcaagtagagataataacatttactttttttgcctcttaggaatattaatatttttgaaggactttgagataactatgcaaaagacacattagggaacggacaattattacaacatagatttagattgctatagtttgtggacttaggttgtaccatgtaggtgtttaaaaaaaaaatctagtcaccagatctgtgtatagtaggcattcaaacgatatctgctgacgtgaatgcacttcagttcttatttataagtattgcttatctttcttcaaaagtgactccccaccacttagagttacacagataaactttagagacttttaaatcctgtggtcctcagggtgtacaggaggctgggtggtgggatggagcgtctggagtgagagcaagcgtggggcatggagtaggaagttctagcctagaccagcctagtctccaaagtcagcgagcatcagcactttccagaaggcctgtcaaacacagatggagccacacccctgagattctgaatctataggtctagggtaaggcctgggaatttgcgtttccaacaagttttcatgtgtgctgatgctgccggtttgagaaccagacttcgagaaccagtgatctggactaaataaacctcaaatatgtcctggaaactgggaagatgtactctagcatccactgtgtaataatcagattgcaccccaaattcaacgtgctcattagtgagaagaattctaattgctttacttaatgcatgactgtgagcaaaatctctgagcttaaattcctttatccgaaacaaaaatgtgtacctagttacggaatgaaggtattacagaatttgtttatttgtaataggcccttttggttttaaacaaaaagcactttatgaatattttctacaagtgattcagtccttactaattgagggcaaatcgcatagctttgttcagttttcacatctgtataatggggataatagcctggagtggcttattcaataggattattgtgaggatcaggtctgctgatgttaaaaaaaaaagagtactttgaatattacaagcactatgcaagctttacatagtccccgtgatagtttattatatgcccatttagagctgaccagagaaggttggtatcttttgtgaattcctatgtttgacttctaaatgttaaagttctttagaacctatagccttgggtcctcttctcttctgattgtacacttattgtaagcaaacctgcccccatcttgtgctaaaaagtaccaaatgtttctctgtggcccaaattcgctttgtattcttgacctgtatatccaacaagctctttcacatttccagttaatgattttttgtttgtttgtttttgagacagagtctcgctttgtcaccaggctggtgtgcagtggtgcaatctcggctcactgcaacctccgcctcctgggttcaagcgcttcttctgcctcagcctcccgagtagctgggactacaggcgcacgccaccatgcccagctaatttttgtatttttagtagagatggggtttcaccatgttggccaggatgatctcgatctcttgacctcgtgagtcacccacctcggcctcccaaagtgctgggattgcaggcgtgagctaccgtgcctggcccacttgatgattttaaaagcatctctgagctaatatgtccaaaactgaactcttgctcttttccctgaaaaatctactctttctccaggaaagggtatgtcttttcatccacttaatcttgccagaaacttggaacttatccttgacacctcccttaccctcaaccccacatccaatccaccgctaactccatcaattctgtctcccaaatatatttctaatttattcatttttctctattcccattactgctccttatatctaaggataacacaatctctctcctgggctagtgaaggatttccattagtttcctcacttcccctcttcctcgagatacctgtccttacaatttcacctccagacggcaggtattgggatctctttgaaatgccatcatcatccccatcagcatcatgtgatatcatcacactcatctaacatgtatacaacacattctataggacaggcacttaactaaggactacacagctattaacttatagaacaacaacccttgatgaattatcatctcagttctttgaaatgaagaaataaaaacacaaaccgtttgagtagcttgcccaaggttacctagctggtaaggggcagagctgagattcaaatccaggccatccgacatagtccaggttatattctactgcctctgacatgctcctgaatatgttgctccctggattaaacctcatggcagcttcccattgcttttaggacccaatctctgtttttaccaggaatttcagcactttgtacaacttagccttcgtgttcctctctagtatcagcttcagactttctttcctttgtatgctgtgagccagccatgtcggcttcattcatctacgtgcacccgacaaacattcatgtccttcagagcctttgaacatgccattccctcagcctgtatcctatcacttcagagaagctttctctgaccctacaaatctaaattaggctttcctcttgccatgtttattatacgttgacttctctgataacaccccacataatgtctgtgtatgtattttgtgcaattgtttatttcatgtctggcttcaggagggcagaaaccacatgtgccttgttcaccactgtctaggcaacatataatacaacaaatgcatatgaatgtgaatatcttaacagaaagttataacatgaaaacagaaagcagaaaaatagactgccaatatattgggaagtcagaagataggaaaggtgatagatgcttagaaaaagagttgaaaataagaagaggctgaatttacaagagaatcagtcgagttcatttagacaaaagatgaaaaagacagaattagatactgacatcagcagggggcctaggaaaggggactactaagagctgtttctggacaaatggatcaggaggaatacagcagttgaggtctgaacctagaggttatacttagatcatcaaagagaaagaacaatattttgcatgggaggaaatactcagagaaagaactctgatattcaggaaggagtgagtctgaaataacatacataaaagaaaacctaagattatctcgtaaactgttcaaagcaaagctcgctgccacagccaacttgtagctagccaacatcagcaatgcccctcatctggctgagtgttcatagagctgaaggtgtcatccagaaagggggaggaatttctcaagctctcatctaacacaccttatgcagctgcattgaaccacagcagctgtatcctggacattatttctgataagctcctaagatatctcgaacaactcataaggaattaagaccacaggttcaaacttcttcataagtgtacgaaaacaatatggaagtttctcaaaaaaactaaaaatagaactaccatattatctagcaatcccattactggatatttatccaaaggaaagcaaatcattacatgaaagagacatctgcacccccatgttcgttgcagcactatccacaataagatatggactccacctaagtgcccatcaacagatgaagagataaagaaaatgtgttatagagagaggctgattaatgggtacgagcttacagtcagataaaaacaataggttctagtgttcgatagcaaagtagcgtggctagaattaacaataattgattgtatatttcaaaacaggtggaagaaaagagttgaaatgttcccagcacaaagatacatgttttaggtgatagaaattttaaatactctcatttggtcatcaggtattatatgcatgtatcaaaatatcacctgtgaaccataagtgagaataactattatgtttcaatttaaaaagtcaaccaaaacactatggaatgataggctggttctcttactggttccttcacagattctcaagactgtctcagtgactgagcagcgagtgattgtcaaattgtgtgagcttctctcagccatgcagcacagcacacggccttcattggaacagacttgcaggaaccccggaggaaagggcctgctgtagcggcagatgctaggaaaggtctgtttccatctcttcgggtggaggcacatgcacacacctgcatgccattcagatggggcacagcttggattgctgactgcaacaaatgccttccaatattttggttatgggaaaagagtaagaacaatatcatccaccatagaaatcacacggaaaacacagccagggagaaagatttcgattttggctctgctgtgaggatatcaggaaaaccctatagtcatagctctagaatagtaatgtgtatataaactgtagcaacagtggaaataagtgatatcagtcatgtctccttgtgtttatttggcatattacaattttcaaagcccgtcatttcgctggactggctgtggggtattgtaacactctcatctgtagggaggaccatgggagcctgtgtggtctacagagctgctgacatcaaagccgttgtgcaccaggaaaagcggagctcagctagacgaactcgtccacgatcacacactgttgcagctggggaagacttgccacatcttcttttggccacttcacctgagtctgatacttgttttccctgcactatttactgtgatcagagagatcaaaatagacactgctttatcagctcagacaggccctaatgttatgaaaacaaagttacctgtctttcaagtggtcagggtccgactggcatggcaaatttctagattcctatagttctaaaatctctaataacaagaactatcagacccctcctaactctgatttacaacccagatcattacaactctgactggataggggactggccttgaaaacattattttctgataaacaactgcacaccttaagccagtttcagcagcttatagaggctgacctcttttgacataaagagccaaatcccacctcattttaatgctaaaaccctgcctcaaagtgaacatggagtatatgttccatatatgcttacctactgtgcatgcactcggctgcctcataaataggcacagcttccccccaaaacctgtgcaggagactctctttctgatttgcaaactgatatctcaaataaagcttgcctccctgtcacttagctatcctagtggtctttgaatgacatcacctagctcccaggttgcggttttgactgacaggccctctctcctgttggagtctgagcttctggggcagatgatgggtgtactcagtgctggctggtggtgattagtacaaggactaccacattatgggcgcccattttgtgaaataaaggaacaaatgagagaaagagctatgaataaaagccagaccttgattctgcatccaaatgtcccctcatcagagaacgctgtgtctctctgaatcattttacttggttataaaagtacaatgggaggaagcccctttatttctttgctttttgttttgttttgttttcatttgctttaaaatagggctttgcaattgtagcgtattccatctttacaatattaaaatgcagggcattgttttacggagagagacaattactgctacctgtgttctgtattgaaaccacttattccaccttcttgttctccactgccaaagagaaaaaaaaaagtgctgagggagtatggaattcagagaattaaaatacactttgatctatttttattgtaaatacttcattatgttgagaactttaaccacatctccacatctttcaaagtcaactgaattctgagaaaaaaagtgtaaagactaaagtaattaaggcttttcctcatccccatcctggctccaaggagtccgctctccccacccccatttccatgaaaaagggtgtggccattcctataagtttttctttccagtctcgtctttttgctgcgccatttccataggttcctttaagaaggccaagtgacctctttgctggcttgggaagtgtgaaggagaagcaggccaggatggaagggcggagagggggtggcggaggggatgggcggcccccacctgcggcccccaggagggacgcggccctggtgagtgaagtggaaaccttcctggagcgtcacattcagctgagtgcaagggtggctcccgcagcccctgcctgtccattgtgtttgtctccagtccatggagttttcattattcattattcgccgggcccgggcagcacagcagcgcccgtgtctgtctaatccctacctgataatgtgtttctgataagcatgacggagcccagtgctcctgacaggactcacatttccagccggatagagcgccatttacatgaggcaggcactgtgaattcagatcagggcgatacgggcagcggcgggctctgctggtgctggctggggactatcgactggggtccggggcgcctccggccccatcattctccccactcctcctagacagatgggccctgggccgcttgcgtgttggcagaagggggaccgatggggatctgctgcctgtggggtcttgcctgccctgacccagtgctgcccttcccgggacccccagtagatgagcctgtggtaccggcatgggacgaccaccgccttaaatctgaggggagtagggacatgcattgtgcctttctcaaggtcggaatccatccgcagaaattacaagccctttaattccaactcgtagtcttgtttatgcatatattttattgcccagtaaaatatttaaatggcttcctcaccaaatattaaaagcggttgcagggcaggaacctcttaaggcctctgattctgtccccttctccttaaagccaaagagaatgtgtctgatgagtctgtgaattcttcagcaccttttgtgaaagaggcaggattagcaccaactagggggccagagagatacaatcccttgagatgatttgagggtgtctaatgctctttggagctgaggccaattctacctttctaacttagacatagcttgaaaaagggaccctttctgagggtatgtgcaattgtcagctcagtcttggaagcacacacccatgatgccactgtcatctcctaatatgtctcaagtctgtcccccatctctcccatgggactactgccctaggcccggtcctcttcatctcctgctgagttcgcactaacgatttcctacctaagtgtcctggcttcagatttcacccatcacactctacctcctgcaacctatgcagcgtccaggtggcatgggtctggctgcatctccagctgctgcttcattccctgccgtgacccccatgcccgtggggtaaagacggctactgcccaagccacccaaggtgctcaggcaccagtttccactcatgcctcatcttctaactgtggataattcttttctattgctcttaataatcacgctttctttgaaatcctcctacctccaccgtgttgtttccaaccgcgtgcccttgttagccccctcccaattcccacttgccagttgcctcccaggtaaactccttaacatgggagctagagtcgagttagcatttcactcctattctaccataatacactgagcatatttcagcatggcacttatcaccttttattctgaggctctctttaagaatctgtttctgatagaacaggattttgtgtacactgaacatctgcagggcgcagggcaaaagttcaaagggagttccagctgccgggcctaaagatttagaagttataaatcaatctatccaattgttagttaaaatatatgttatgttaatacctggataaatattttttctaatgacctacaagcctaggttcagatttggaatccttggatacctcagggttcctcactggaagataatgggaccaggcgagctttcctgctttcctgcttcctggctccctccccatctccctctaacccccgaatccatcttgctctgtgaaggaactttgtgtacatgaatggacaccacaagccacacatccaggctcttcccagaacccctgcaaataaccacctcctacacatgaatatcatatgtacaatacccatacaaagatgtgactaccatatcctttctaagagtaaataactagaaacataataaatgccattgctaggggaaaggatatgtaagttttgtatattcaaacaatgcactttatacaacttaaaatgagtgaacccaatttgacctatcaacctaacaaaaacatgaaaatatcatgagtaaaaaaaaaaaaaaagaaactataaaagatatgtacagtgatgccagctgaatgtgatatattatttatggtcccataaatgtatagaaaaataataaaaacgtgagtgaaactgacatataccaaatttagaagagtggtaaactctggaactgaatgggtatggcaagagcttcattggtacctattcatatacgtatacacacacacacacagacacacacacacacacattcaaagatccgaggttaacatttcaaatatcttgttgagtacatgggtgttagctgttgtacatttcatacgtttgaatttttcttatcttttaaatatccccaaatttttaatttttagtgatgtttgaatttgtatacttgtactggagaagactttaaatgaatagaaattctggagtttttgtttgtttctctttattggactagctttattaagacatttcaaataccatataatttacccattcaaagagtataaaatacaatgtttcctaatatattcacagaagtatacacccattgccacaataagttttagaacatttccatattcccaaagtgaaatctcatgccattgggcatggcacttaaaacgaacgagccaaatttaacctatcatttaactccccatttgtccccaagtctctgcactcctactccctgcctgccctaggaagccatgtatctactgtctgtgtctatagatttggaaattccacatattccatatttaatttcatgtaaagggagtcctacaatagcatgtttttgtgactagtctctttcacttaacatactgcttgcaaagtccatccacgctccacttcatgagctaggtgctattatgatttccacttacagatgagaaaattgggtctgaggctatatttagattaataatggcattgaactgacttagcccaggtctgcctaagttgtaagcttgtgcttataacccttgtacgacacagtcggccttctatatctgtgagctccacatccatggattcaaccaagctcagatggaaaacatgttttttaattgcatctgccctgaacatgtacagacttattttcttgtcataggtccctaaacaatacagtttataagctatttccatagcatctacattgtatcaggtactatgagttatctagagatgacttaaggtatataggaggatgtgtgtaggttatatgcaagtactatgccattttatatcaagaacttgagcattcccagagtttggtatctgcatgaggttccagaatcaattctccatggataccaagagacaaatgcacttcatttatttttggctaaataatatttgattgtattaatataccaaaggttattcatcaatttatcaattgatggtcatttaagttgtctccacttttgactatgataactaatgctgctgggaacatttgcgcataagtttttgtgtagatatatgtttttatttctcttgaaaatatacctggacacagaattgataagcgtgataactttatgtttaatcttttgaagacctgccagattgttttccaaaaacaactttgcaccactaccggcagaataggagaattcaaatttctcagcattctcactaacacttattattatccacttttcttctttcttttttttttttttttttttttttttgatacggagcctcgctctgtcacccagtctggagtgcagtggcacgatctcggctcactgcaagctccgcctcccgggttcatgccgttctcctgcctcggcctccctcctgagtagctgggactacaggcgccagccgccacgcccggctaattttttgtattttttagtagagacggggtttcactgtattagccaggatggtctcaatctcctgacctcgtgatctgccgtgatagtgagtgtgaaatggtatcgtattctttgtttaatggctaatgtgaggatcttttcaggtgtttattagtcatttgtacatctttggacaaatatctattcaaatcctttgcccatttttaaaatgggctatttgattcttattgagattcaaggattatttatacactctagataaaaatctcttaacaaatatatgatttgcaaatattttctctcactctgggttttattttcacctttttaatagttgtcctttggagcacaaaagttgttaaatttgattaaatccaacttacctttttcttttgtcacttgtgttttcaatgtcatatataagaaagttttacccacccagtctcaggaagatttacttctgtattttcttataggaattttataatttcagctcatacatgcaggtctgtgatccatgttggattaattttggtgtatggtgtaagaaaaagttccaacttcattatttgcatgtgcatatccatttgtccccatcccattttttgtaaagacaattccttctccaattgaattgttttggcagccttgtcaaatgccaattaactttaaaagtgagtatttattgctgaactcaaaatcctattctattaatctagaagcacacctcagaaatcctgtaggttcagttccagaccacctcaataaagtgagtttcactataaagcgagtcatataaacatttccgttttccagtgcaaataaacattatgtttataaatattttggttttccagtgcaaataaaatttatgtttatattatactgtaatctgttatatgggccataatagtatgcctaacaatgtacatgccttaatttaaaaatactttattgatctctatcaatgggtcagtagaaaagaaaacataaataagttaaaaaataaaaatattctattgttaaaaaatactaacaatcatccaagctttcaggaagtcataatctttttgctgatgaagagtctttcatgatgttgatggctgctgactgatcagggtggtggttgctgaaggttggggtggctgtggcaatttcttaaaattagacagcaatgaagttggccacgttgattgactcttcctttcataaaagacctctctagcatgggatgctgtttgatagcattttactctcaatagaactttcaaaattggagtcagtcctctcaaaccctgctgctgatttattaactaaaattatttttatttttgttttatttatgtatttatttttgagacagtctttcttatgatctcggttcggcatgatctcggctcaccgcaacctccgcctcagggagtcaagcgattctcctgcctcagcctctcaagtagctgtgactacaggcatgcaccaccatagctggctaatttttgtatttttggtagagatggggttttaccatgttggcaagactggtcttgaactcctgacctgaagtgatccacccgcctcagcctcccaaagtgctgggattacaggcatgagccatggcacccagcccaattaactaaaattatgtaatacttcaatcctttgctgtcatttcaacaatattcccagcatcatcaccaggagtagattctatctcaagaaaccactttagttgctaagtcataagaagcaactcctccttcattaagactgtattatgaaattgcagcaattcagtcacatcatcaggctccatttctaattctagttctcttgctgtttcagcacatttgcagttactttctccattgaagtcttaaacccctcaagagttggaatagacttccaagcttctgttaatgttgatattttgacctcctttcatgaattacaaacgttctttatgggatctagcaaggcaaattattttctgaaggtgttcaatttactttgccacattcatcagagcaatctctatctatggcagcagaatgggtgttttgttaacaggcatgaaaacaatattcctctccttgtacatctccatcagagctcttgggtagattgtcaaagaacagtgataatttgaagtgaatctttttttctgagtagcaagtctcaactgtgggttcaaaatatgcagtcaatcgtactgtaaacagatgtgctgtcatccaggctctgttgttccatttgtagagcacgggcagagtagatttagcataaatcttaagggtcctaggactttcagaatgacaaatggcttcaacttgtggtcaccagctgcattagcccctaacaagagagtcagcctgttctttgaagttttgaagccaggcattgacttctcctctctagctatgaaagtcctacatggcatcttcttccaatacaaagctttttcatctacattgaaaatctcttgttgagtgcagccgcctttaccagtgatcttagctagatctctggataacttgctgcagcttctatgtgagctcttgctccttcaccttgcacatttatggagatggtttctttccttaaatctcatgaaccaacttctgctagcttcaaacacttcttctacagcttcctcacctccctcagactttagaattgaggagaattagggtcttatggagaaggaaggagatgagggaactgtggaacagttcagagcacacacactatttactaagtttgcccttttataggggtgtggtttatggcactctaaaacaatcacaatagtcacatcaaagatcactgattacagatctccataacagatccaatagtaatgacaaagtttgaaatattgtgagaattaataatatgtggcaccgagacattaagcgagcacatactgttgaaaagaaaaatggtggtcataggcttgctcaatgcagggttgccacagatcttctacttgtaaaaaaaaaaatgtgatatctgcaaagctcagtaaaatgaaggatgcctgtttatgtctgttcttatgccagtatgactttgtcttcactactacaatattgcattaagttttaaaattggatagtgtgattcctccaacttagtcacttgtaaagttcatttcggctattctgggccccttatatttctgtgtgaacattattatcagcttgtcaaattcagaaaataagtcagctgggatttcaataagaacttattaaatcttgaccaatttggtaactattgcctttttaacaatattaagtctttcattatatgaacattggatgtctttccatttatataggtcttctttaatttctttcaataatgttttgtagatatcagagcataagttttcacttcttttattgtgtttattactaagtattttgtatgtaattgtacatgaaactgccttttaaattttatttttggattgctcattgcaattgctagtatgcaattgatttacatattgacttatcctgcaaccttgcttaactcttttagcagttctaatcaaacttttaatggattacttaggattttctatatacaatgtcatgttatttacaaaaagatactttccttctaatctgaatttttaaatttgtttatgtttgtttgtttgtttttactaatttctttagctagaacccatagcaccttgttgaatggaggtggtgagagtggacatcctcatcttgtttctggatttaggggaaaagccttcagcatttcaccatgaagtatgatgcaagttgtagattttttacatattccctttatcaagttgagaaggtcccttctagtctaatttcttgagtgtttttattataaagtgctgttgggttttgtcaaatgttttgccttactaatgaaatgattaaatagattttgtctattactctattaaaatggtggattacattaattgattttaagacgtttacctttcatgcttgggacaaattgtatttagtcatgatgtataatccttttttatatatcactgtatttcacttggttgcatttttaaaagtttctgatctaatacccataaaatattttcctgtagttttttacatgtgatgtacttgccttttttggtgttagagtaataattacatgatagaataagttggaaagtattctctgatcttccattttataaaaaagcttgtgaagaattgatattatttctcctttaaatgaaacaattcaccagtaaagccaccggggcatgggcttttccctatggatagtttttagattactaattcaacttatttactttgtataggtctactcaaatttttaatttcttctttagtcagtttttgcagtgtgcatctttctgggaatttgcccatttaacctgttatctattttgtaggcatacagttattcattatagtttcttataatcctgttatttctgtaaggtaagtagtaatataccttctttcatttctgattttggtaatttgagtcttctctttcccagtctagctaaaggcttgtcaattttgttgatatttttaaagaaccaattggtacttttattttagaaataattttgacacagacttccattttatgacttttttaccagcactgtgaaagatcctacagactcatgcctggagagaatacaaggtcttccagaatggtataccagccctctcaacatctcactacacaccagaatgagatggaaccaattccaggtatatttaaataaaacaaatgctaagtcatctatttctttctataattctaagaaacttttcaaaccaaacaaataaattgcattgaatattagtactaaaagaaatctctgaaactattattttaaactgcttttgacagagaagaaactgagatgggtatataaatttattttatcttgagcttttccatttttgtgtttaaaatcgcttctacctgcttatgcctctcaggttaagtctcagtctattctccgagctctaggctcatgaattcaggaaatctttattgagtgctattatgtgccatacagtattctatgtgcttattatgaaagataatgtctgccctcaaagcaattacattttgaattaaatcaaattttcgactttgaacattcctctttagatgtttctgaggcatttcaaaactaatatttcccaaatgctgctcttgatttctctcccaccagaattgtcatctccccccaccaccctcatcatcccgaacccagccttcaccatctaagtaaatagcaccaacagtcatgaagttcaagccaaaatcattttgggctactcccttttctttttgaccatcagaaaatcttatgcttctgactcaaactgttacctcgaataagttctcttctttgcaccttcattagcacaaaccgtcaccatctctaccctcttaactctttctcctccttcccccagcacacagtccattttttacccaggatctgaagtgagctttacttaaggaaaaccagatcatgccaacccttccccacaagcatttccgtggcttcttattgtacttaacatcaactctgaagtccctgaacagacttggttactcggcccttgcttgcctatccagctgcatcatgaatcaccctttgctcagcctggtctatgctcactagccttctggtactccatcaacgttggttcaagacatgaatggagaacaaatccttaaagatttcttagaaacaatttctgacaccttctttgtgatccagttacaacatctctcccttttagagaggtttttctgaactacaaattctgaacataacaaataccaacagcagaaatatgcaaaaaaaattagaaaatactgtaccacagaatattcactggacgactctaggcattagatgtgatttcagtgaagggtctatgttcctatcctgagtaccagaaaagtgcgtgaagtcaaagccatgtcagagattaaattttctccagtttccagggccatagtagagcaaaaatccctgaatttcctctagaaatgaagtctgatttctgtaggtagatgggaaaagaaagaaaggggtctttgaagcaatttattgtgctattccccatcctctttggaaaattaaatgcttttttcttcctagtacttagacttcacttagaattaaaggtagaaaaataagaaccataacttctttcttcagatgatcataactgcttgatagaaggtctttaacaagctcccactctaacaagcaactgtcgttttcatgttttggaatggtttaatcctggacacgataacatcctcaaaaagcaagtgcattaagctgtgacaggtttccactgacctaagcaaatgcattaggaaaacgccattagcagctccctctcttcatctgttctcccctcctcctccccaccagtaaaagctatgctcaatactactattaaattacccttagaaatacgctccttgaagaaaatcaatgcacatgtgttttagcacttgtcacagatagatcaaatggccattctagcatatattattccacccaaagctttcaattttaaacgagcttcttttggtggcacattttatgagctcacatccaaactaagaaaaagaatacagtgggtaaggatggggataaaaataagaatgaatcccactaccattcccaccactttttctgcacctctgtagtacttaatggtgaatattaaaacctcctggtggaatgaggtaaaattgatgggacatggtgggagggaaccagaggcctaaagcccaaactcactatgattcaacttggaatactcggaacactcatccttcactaatgagcgaggatgtgctccttcttgtgatcatttccccttgcttagtcactacccactttccaccagaaggtagcatagtatagttgttaaggtataggagctaaaactacctagtgactcaataactttatagatatataaacttaggcattcaattaatctgtgtgtcaatttttctacttaaaaatagggatagtacctaaattagagtgctgttgtaagaattaaatgagtttaatatgtaaggcattcaaaacaatgcttggcatatagtaagccatgctcactattaactgttcttatttaggatgcttgctaagaagaaacgttattattcctgataagaatccttgagacacattacataaataattttcactttaagccacaatggagtaactgtattggaatagaccttggccataaacagctttaaaatatcaaatataattgtcttcggtcagtaaagagcaggcaacacaagactgaaatggctgatagaaggtgagccccacagttcgccaggtttctacctggagacagtttcccaaccacattgcaggaagtcagagtcaaagcaaggtgagccccacaattcgccgggtttctacctggagacagtttcccaaccacattgcatgaagtcggagttaaagcagagtactatgtttctgcggagcccaagtggaaaaatcatatttcaaagcagctggagattctagaatttacaaggtggcaaactagagaggaggcaactgtgaaaaggaagcctcacaagatgctctgggaggcccctgcaagtctgtggctgagggagtcccccactgagcaagacaagcagtttaccaggtggcagctgctatgtaattaaaagcagaacatagctactaaatgcactgctggggaaaatgcagtgcctggagattttgaaatttaggccccgctagaatgatgagatctaccccttagcacacgaagtctagttgagagaccaaaatggtggtcctatggtgtaatgactagaaatagagcacgacttatgctaaactctctctagaaaagcctcaaacgaagccctgacaagatccaatgtggatcccaagctggaccttggctagttagaccagtgtgatcagccagtaattgagctgcttgttaaaacaaggatcaatagtctttagagtaaggtaacagaatctagagactgtatactgtattatctataatgccaatattcaacaaaaaatcaatagtcctaaaaagaaagagaaaactgtgatctagccttaagaataaaatccaccaatagacactgaacccagatgttagagttagcagacaaatatttaaagcagccattataaatatagtcaaagaattaaataaaaatgtgttcacaaaattataggaaaatatgatctaaatgaatgaacagagataatcttgacatagaaattgaaacgatagaaacagaaccaaatgaaattctagaactgggaagtacacagcttaaatgagaaactaactggatggactcattagcatattcaagatggcattaaaaagccagtgattttgaagtcagataaatagaaattatgcaattttaagagaagaaaaaaggattttatgcaattttaagagaagaaaaaaggattttatgagcctcagggaaatacagaatgctattaaatgatttactttttgtgcaattggtgcctaagaagaagaagagagtgacattgtgcaaatattttaagatacagtggcagagagcttcccacattttatttaagaaaccagaccaacctattgatcccagaagtccagcaaacatgaaacagaataaatataaagagaaccacacctaggcacatcataatctaactgttgaaaaccaaataaaaagagcacattgaatagagacaacagcaatagcaacactctgacttctcatcagagcaatagaggaggaaagacagtggaacaacctctccagattgctagaaagaaagggaaacagtcagcccagaaattctacagccagcaaaagtttcacaggcaagagtgcaataaagaccttttctataaatgaaggcttagaaaatttgttgacagcagattttcactgtaagaaattaaaaaagatatttctcaattcaaaggaaaatgatgccagatggaaactcagatctataggtaaaaatgataaatatgtgggtaaatataaatgagtatgtttacttttcaaaatttactttaaaaactgctatttatagcaaaaataataacagtataagatggaattcaaaacatatgaaaatgcaaattatatgacaataatcacacagaaaacaaggacaggtaaacataaaatagacaataggaagcgagaatcagaaagtgttgggtgtgaaatgtgaaggagaaggttacatatcattagccatagagaaaccatataaaaattttaataaaaagagttatagctaagaagttaatagaagaaataaattggcaatctaaaaatactggattaacataggaggctgggaagggaaaaccagaaaacaacaaaagataaaacatacaaacaaaaaaccaaattgccatatggtagacttaaatcaaaccaaaacaataattacatgaaatgtgaagggatttaaaatgccaattaaaaggcatagactaacagactggatagaaaaacacaacacaactgttagctgtctacataagacacactttaaatataaagaaatagacaagtttaaaaggatgagagaagatataacatgcaagctgcaagcataagaaagttgatgtgggtttattgatatcaaacaaagtagaaatcaggaaaaagtatattacaagagatcatgtgaaatagtgcatgataaaagagcaaattacccacaaggcatgctaatcttaaatatgtattcacctagtaacagagtatcaaaatccataaagcaaaaactgacaaaattgactgaagaaatagacaaatctacaactaaagttggatattttaattccactcactcagtaattgctagaaatgtaggcaaatatgaggaagaaaatgtaagatctaaacatggttgtcaaccaacttgatctaatcaatatttacaggacactacacccaacagtgccatcatacacattcttttcaaatgtatataagctattcaccaatatataccattatccttggccttagaacaagtctgaatacaatttaaagcctgaattggaaattacaagcaacaaaaaagcacacatttctaaataactcatggatcaaaggagaagtcacaaaaaatgcaaatatttaaaatggaatagtaatgaaatatatcaaaatgttagagatgcccctaacggaatgctcgcagagaaatgtatagttttgaaatgcctgtattagaaaagaagacttacaataaaataaaaatctacatttccactgtaagtagataaagaagaaaaatctaaatcctagttatatagacacaaagaaacaacaaacataagagcaaaacccaatgaactagaaaacacacaatagagaaaacctacgtctcaaacttggtttttttggaaatacgaatacaatttaccaaaatccctaaaaagaataatcatgattaagcaaagaaggccaaattaccaacatgaagaataaacatgagtctatcactagagatctcccaaatattaaaaggaaaacagggaaatagcattaataagttatccccatgaacttgacaactctgatattactaaaaatcaaaaagttccttgagaaatgcattctataaaaaaatctgtaagtcccatttcacttcaaagaataaaatttataaatccacgggtaaattctagtattcattcatctccacttcacacatactggttctgaatggggctggccaagaagcagctcttaaagtgctgtggattcctctccctccatctctgaatagccttccagtgaccatatctttgtgtagccagccagacatgcctgaagggaaatcaaggaatcatagctataaaacgggaggtcagactgcaagtaccattcttctctgggactcttttctgttagatgctcagaatttccactcccagctaaacccgtatcaatcaaagggatagaatttataaatctctggtacattctatcattcattcaaggatggattaataccactctcaagcaaactctagcctgaagaggaaattcttcccaacttatttgtaaggccatcaaaattctgatttgtaatctgggcaaagatattacaatgaaagaaatcacgtattacatgagtaaatgtagatctttctttctttcaagagagatatttttaaccgttctttctgctggcaatgaatttgatcaagctacatgaaattgctgtatcatatagctagctctagatttaaaaagtcaaatatcagcaatttcatttggttcaattttatactaggggatgggaaccaaacacagttctctacctaataaggttcacagcttagagaaggtaggccaacatgtccacatgtgattacaaggcaatgtaataaagctccgactgcgggatgttgagacactatagcacggtgggaatgtaagtgagaaatccctgcctggtctgtcttgatgcgcagtgtgagagcgttcagcaggaagacctgcctgaaagaaattcctggcagtgggaacagaatgtgcaaatgcacagtgctacaagaaagcattactggtcagggaaatttgaagagattgatacatctaaaatgttaaaagcacagtggagggggcagagcactgtgtgggatcatggtaaacgcagtgaaggctggaggcttgatcctgaagggttaacacatttttttcccaaagaaatttgatgatcattgggtataaccctgtgatgaagcttccactttcctagttagtgtaaatgaaacacgactgtgagcgggtatgactgtcgtctttccttgccttatcttttccttcacctacttgctgctaattattgaaacaggtttgaagcaatttgggattgtactgaatttctcttggcaaactacacaggatttcagagctgaaagtaattctcctaaaaagcagtaacacatcattgattatcctattaataggctctcaaacctgcatggagaaggtctcttagtgataaccaggacctctggccaaaggatggtgctgagctgctgaaagcttttagtttcagatacaaacataattcagacctttgttattctaaaagccccaaaagaaaagctttgcttttttaaaatttggtcggtgggggcgggggggttgctttttaaaagtttgcttgtttttaccccactgacagcttctggaaggctatactccaagaaataagctgtctagagatcttaaagaaagtggcactcactcaggatttaaaaggaaaaacagaagcagcaaaaattaatgctgagttaattttcttccataatgctaaccaccttacttactaaaccattcgctgacgctaagaagcagcatacgtggctcatttcccattcatttccctgggccactatgatcgtggtgttaacagcagggaaatagcgaaatgaggtgggaagacagaggagagcagtgagcacaagtgtgaaggaagtagataatccaaacctcagttccccccatactccagggctgacttaggaacctcatttggacaaagcagctccgagctacagttaccactgtgctttgtgccaggccaagtgctaagtgctgaaccaggatgattttatttaagttcatgtgggtgtacggagcttatttttaatgttccttactatagattataaatcttaacaacatttttaatattgtatttctaaatgttccccagggttaataaaagactggagtctccagtaagcataatacactgatagctcatttatttaaaatgccatcttaaaaaactaaaaattttaattaaaaaaagtgccatctccaagtgtttatttatgatttatgttaaattctatgagaattggtctctgaatagttcacattcacccccacttcacacactgatctgaatgtggcttggccaagacgccacctcttacagtgctgcaggtttctctccctccatcttcttcttgtttatttatgtacttatttattttatttttatttttgagacggtatcttgctctgtcgccaggctggagtgcagtggcgcgatctcggctcactgcaggctccgcctcccgggttcacgccattctcctgcctcagcctcccgagtagccgggactacaggcgcccgccaccacgcccggctaattttttgtatttttagtagagacgggatttcaccatgttggccaggatggactcgaagtcctaacctcgtgatccgcccgcctcagcctcccaaagtgctgggattagaggcgtgagccaccacacccagcctctccctccgtcttctgagctagccttccaagggccacatctttgtgtaggcagccatacctgcctgaaaggaaaccatggaatcgtggacatgaaagggcaggtcagacttcaagtctcattctgctctgggcatcctttctgttagatgttcacaattcccactcccagggaaaccttgcctaggtggatacaggtggaaagaaaagaagggttatagtgatggaaacttccaagcaccagcatgtctagactcagatcagaagcaaataccaggcagggcacggtggctcacgcctgtaatcccagcactttgggaggatcacgaggtcaggagttagagactagcctgaccaacatggtgaaaccccttctctactaaaaatacaaaaattagctgggtgtggtggcgagtgcctataatccctgctactcaggaggctgaggcaggagaatcacttgaacctgggaggtggagattgcagtgagctgagatcgtgccattgcactccagcctggttgatggagcgagactccatctcaaaaataaataaataagaaaataccaaagagtgatgttgaaaatggaacttaacggctgtaccttcaaaatgtttcctctgggcacctcaaacgcatagcacctaagggtagaggaaggaaaagggtttcctgttaccatattaagggctgagtctttataccgcccattctccctctcagttcaggccagctccttgacctcagtttaatgaatttctttcctgtttataaagatcttcaggtgctgggtgggtggggataacacatccccttcttgggcattcagtccagtgtgtaacaatttgcagaatgcttcctgaagcctaacctgatcggttcactgtcagtgtcagagaatttcataagcaacatctggcacatttttaggtgccccccaagagctgtgcactaactacctacaagctccttgcaaagggtttagtatcttgtaagggcccccaaaatattaattaaccaatcaaactgctcccagctgcaatttgaactcatttcgtctctaggttgggaaacagggaatgtggtcattattctctccattaaaatcctgcccagacataacgattattattaaatccctcttacttctcttctcagcatcaagggatttcaattcttttcacctttctttagagttgcaattcattgaatcacaggtgcagaagggagttaacaatataactcaatcaataattatttccaaggctgatctagaccccctcagattttctcccatactgtgccatcccatccagatgcagttttctagaagagcctgattaggccccgggaaagtggctgttttggtttaaagatctgccctggacatgtcaacacctctttctttcggttacggttttgtgtattttttcttatgtgtctatatttatagctttgttccatatcggagtgagaacagagacagatcctatgccgctaattagagccccacatgttaatgaacccccaacagcctgctgccttagagtgtcggcaaccccacaggaaattaataagagccttaatcactcagagactggaaaggtcactgctcactaagggttcaaacgcagaaacagcaacacaatcataccctagtttaaaagcataaaaaccatccatgggtgtgaagagcctagcgctccatcaataggcagacggattagagcatcagcttgttcacaggactaaatgaacataatcgcagaacagtgtgttgcttatcctcaaattatattaatatatacagtgatgtggtcatctcttgtacctcttagtttatttctccagcttagacgcagtggcttgcagcataaaatacctggacagtctggatcccccagcattttagcctaacttttctcattgctaactgtgcaccagcttcttcaggggtccttttaacccaaccttagagaatcacaacattaaggactaaatgggacagggaaggagcacattcatggccaggcccttccctgagtggccagggatgaagagcactaaacttccatcttccaagaaggaagacatttacactgcgcattgcaaagtatagatcagtttcctcaattttactccctgtgtctgaaaggtgaacctgagcaacaggtggcaataaaaagtagaaaaaaggaatgatataatcttttgcgataaatgctcctaacctaccctacagaggaagaaaattgaaccaaagaaatagcgttgacactcagaaaattaacattacagaatcaagagggagaaagttttaaaatcaagcactgcaaagaggatatgaactgaaagctgaggcaagactattagagacagcaattaggaggttattggaaatgttttaaagtgtagtttcaatagcatgatgaagcagaaaaccagatggtctgctcccttcttttatctgtctattaaaagtggatccaacattgagaactcagcaaatattctacttccagctacatttaattgcctgctctttggaactacaatgatcttgattatcttatcactaattcatctcctactctgttattacatagattgtggtattagttatcattttgtgtatatcttcctcaccaacttaaattctccttgagggcaggagcctgcttttactagtacttttctgtatctccctagcacttaatacagtgatttccacataatatgtcctcaaaaaatattcattgaaagcaagatgaattagatctatacagaggtcctataacttgaggtttgtacagctatgatttactaaatgagacctccctgaaaacactgagcagttctgtaaaacttataaactttcaagttaatttaaaataaaactcaataaaaatcaataaaatattcccttttgattcaaataggttctcttttttaataatttcattgcttttgaatttaatttctgtgaactcagtacacattttttttagataactttatattttgatgatatcttcaggatatcctggttcagactttttacagctcaaagatcatgtccatctgcatatctcttttaaagaactcatatatggaaacagtgtctcaattataactaggcagcattactgaagtcagtctttacagcgataattagaagtctcaacatatttttccgtcaaaagagtttattaagagggttgtttaattttcaaaatgagttcacaaaagttcctttaattctgcagaagtaccagcacaatggtagaacctgagcaccataaccgtcattttactgcatgatggacactaccaatgcaagagaagcagcccccatcatcagcaccacggtgccacagcctgcagcagcaaccttctcctctcttctgtatccccatcttaaatctcactcttagctgacttctatcttaattggagagaacctctttaaagatgcagcactgtgcatccccagcatcaagtccaaacccctcattatagatatcctttatccactgttttttgtccagctttatccctcatcattgcctctgtaagctcttccttctgccaaccttgaactactttaacctgtgaaactcctaccttaattctcatctcagctgcttcccccggtgtattgctctcccccatcctaccttccctgggataattactgtttgccctcagcctcagcttaaatggaatctcattttggaagccagcattcctcacccttgtctgagataggtgtgcgttttacatgcactaataacaccttttcaaataacgtgtccatcgccttcacaatcacctctttagtggttgcctcaaagttatccttttcacactgaaatcccaatgtctagaacagttctgatcacaaagtatgtgtttagtaaataactagtgaatgatggatgaatgacagcagtcacttccaagttcacaggtttctttgctcattcattcattcaaaatactgttgaattctactacgtagcaagtgatatgtacgaggaactggagagtgatgagttgaactcattgtctgctgtttcagtcaaggttcttcagagaaacagaactaataggagattatagatagagatagagatgtatttattatgagaaattggctcatacggttatggaggctgagaaacttcataatctgccaagtacaagctggagccccaggaaaaccagtggtataattcagtccagtgcaaaggcctgagaattaggggagccaatgatgtaaatcccagcccaagggcagaagctgatgaaatgagatgtcccagttcaggcagtgaggcagaaatgaaaacatgaggaagggcaaattccttcttcctctgccttttgttctatccaggccctcaatagactggattgtgactactcatattaaaaagggcattctagtttaatgagtccgcagtccaccaattcaaatgctaatctcatcctgagacactttcacagacccactcaaaaataatgtttaatctgagcactccatgacccagtcacgttgacatgtaaaaaattaaccatcacacatagcctcatggagtttattgtaatgggaatttgctatggggggctgtggaggaattaggatttcagacttcagactccaatgaaatagaagattcttgtggaagcagctcacaagaggcaagtgttctcattagtgtggatgaagtgggtcctaaatacacttcctacaatagcacacagtcactcataagtgttctgatctcagtggaatatgactcctttagaaaaaaaataagttacagtaaatcaccgtgaggtctttattgtgaacttaaaagccatctttccccaaagagcttagtttcatttcttacctgattttcgtgacccccataaaaccctttgctgtaaagttgaagcctttgccccacatggactattttaatagtttcttaactcatctttttgcgtccaaattcaccagattaaatccatttctcattcttccatgagtcacctttctaaaacgtctatcggattatgcctttccctttttgatgacctacctggacttttaagtcttgctatgagaatagaagtctcctccgcatcttgacctgtcagcccgctgaatatttgcagaattctctactgtaattcagatggcagggacctcctgtgaagtacgtgaggatgggaaggggctacacaaacatgtaatacatcagacaaaaataatagattaaagatgtgtggagatgtttcaatgggtgcccttcgctcttggcgttaagtttgaagtctttagcaaaggaatttaaggtctgtttggccctgactcttcctgtctaccttagattattttcccccaaaatactttatgccctttcatgttaggtttgtgtgagttgagaagtgacagtgacagttaagaagagtgaatacagagtactctttccagtaggttaggtgtgaggagaatgagggagattattgtgaccccccataggagggtccccaaaggaggacatggggttgagatggttttaaaattcttattcattgatttattttcttcaaaaactcatgtttatatgttgtgacaaaatttattaaagccagtcaaggttgaagatctagaagaagaaagagatactggatggcatgaaatcctgaagaagaatgcaacagacacagatagagaaatgtgtcttgctgcaaagcagagatgtgcacaaggaagataagatgggtgctagatgcagaggaaggcaggcaagaagcagcagctggaggcagttcacacttattggcctaatttttctctacataaaataggacatgaaatcagctggtgggactgtgaaaagtggcaagggcaagttggagtcttgaggaaatggacatgtttgcgatagctgtgctggaaataagagtaatattggactaaagactcagaggctttctaagcagcatgaaaaatcacgtaggatgatactgattccaacttcatggcattgtggtttaacatgatcatagacaagcagtctctcttaggtcagtttctgctttgaaacagcttggcaaactgtttttgtaaagggccagataataaatcctttggctttgaggggcatatggtctctgttgcaaatactcaattttgccatttaaaaatatctccgaggcattatgtaagtgaatgtgactgtgtaccaataaaactttatttacagacactgaaatttaaattttatatgattttatgcattatgaaatattcttcttgtgatttgttttcaaccatttaaaatgcttttttaagtacaaaaacattcttattttatgtgttatacaaaaacaagaagtgggcatttacctccaactgcaggtaagatttcttgtttatagcaggaagagatacgtgacacctgggtgttcagggaacaaggctattactcatgagagaagaagaaaactgagaatcacagcgttcgagagttctgagagagtttttggtccgttgtgggactgcattttcatgactcaaatacaacacagatgtgtagcctgcttctcttgttcattttaggatagagataacaactcttctctccacagccatatccttctttttcaaaatcagttgtacaagagggagaagggtatagtcgacaaataaacaagaagagcttcagttctttattgatttcataaaatgaggcgtgaagagggagttgacaacaagggaatccaggattggaaagacagttacccctcagaaaggcgtttctgtgctactctcctctcctctcccaataaagggaataagacccttttgttgacttccagcctcactgaagatagaagtaagcggcaacaatgatggctcaggtggagttagatgtgggtagcacttgtaaagatgatggatgttgccaaatggtaattttctctgtgtggtggctatgattgatctgtggcttgatgtgatggttgaggctttcatattcaatcttaaagaaaaaatatcatgtcatacacagggagtttcagatgactggggtgggggtgttgcttgctgggatagtgctttacttttgaagatgatacactctgaaaaaggagtatttctctaaaactcaagtctacaaaccagtgaaggccagtatatacaattttattaatataatattccaaataaattttctttgtatctctattgaccctgtagtcttaggtatgaaactgaaggacttgggaccacaggtgttttcatggcttctttttttgtctttggaaaaaaaatttttaaagggatgtgtgaagcagacagctggctatgtagctgatactaaaggaaaataaggtttgtttttctggatatatgcctatgcttcagaggtgatctcataacaagggcagagaacatctcataattccctgaaatagaataatgaacttggcaggagaaaactcagctttaccaggagggctttgaatttaaattttagaggcaaaagggagggattagataaatctatatatttagactgtaatgagtgccttgtaactgcccccctcccccgccaaaaaaaaaatgtaatggaagaagagcctagtacttatcaggatgaaatacttatggctacggaagtctatatatcaatgcgaagagtatttataatatacaatataaaccttaaactttaaagaaataaaacaaaatattttaagtatcaccaagacgttatgaagtagtgaccacaatatggcattgtacaagggagaaactcattctaagttgacatctgatagaagaggagatagacagctacagaccgtgtttagaaagcataaacctggatagaatcccacagacctgagaacagacacttcatgatggagcctcactgacaatctggggctatactgggaactagcaaaagaggtgccagggtccaaccattcacagatgaaacaactgtagaaatactgagcctggaagtagagaagatccttgattcatttcctagatttcaattttctattgaaattttccatcctttcatttactttatcaattttttattctattttcttctattttatcttttcttcaatttggggtaattaattgtatacatcaacaacacatttaaatcagtgggctttgagcaaagtcgactgccctccgtaacgtgggtggacttcctgtaatcagttgaacccctgaataaaacaaaagactcacgatctagcgcaagagggcatgctgtcagcacatggcctttgcacttgaactgcagcatcagctttttccatgtctccagcctgccgcccaccctgcagacttggacttgccagtcttgctcgccgtgtgagccaattccctaaaacctctctctctcttagatagatagatagatagatgatagatagatagataaacacatagatagatatgagtgtatatatatatatagacagattatattatatataaaatcatattgtttctgttttctggagaaccttactaatacatgtgttaattatagttatttcaaagtccttgcctgccaaatccaatataagaaccatatatgggggaggggggaggcatagcattaggagatatacctaatgttaaatgacaagttaatgggtgcagcacaccaaaatggcacatgtatacatgtgtaacaaacctgcatgttgtgcacatgtaccctaaaacttaaagtataataaaaaataataataaataaataaataccctctacttggggcacaccctatgtaaatgaagaggatgaagtaaagttacaaagtcgaaaaaaaaaaaaaagaaccatatatgggtctacttctattattttgtgtgctatgtatggattatcagtcatatttccttgccttttcacacatctagtattttttaatgccagaaattttgtgcataccagaaggaataggagggatctctagagaaaaataatatctgtagctttatgattcctttatatgcaatgtctggtatgtactacaaggtcactagaagcaaggaaatatgactgataattgaacaggggaaaagatattgaagcagaccataatatgatacctatattggagttagcagacaaagactttaaatgactatgattactttggttaaaaaaaaaaaaggagagagagacaaaatggatgaaatagatgtatatataaatgaagaattttaacagagtgtttgaatttatttttaaaaaattgcatagaaattccagaattaaaagacacaatatctgaaatcattaacccaatagatgaatttaatagcagttggacacagaattatcaacctggaagataggccaatagatcatagccaaattaaaaaactgggaggaatgaatattttaatgctattcaacatgctgccattacaaataattatacaggattctcccattttttgttatgacacaatatatttgtctagacatatgatatcaatatttatttctgagttgtaggatgagggagttttgcttttcttctctcaattatctatatttccctcaagaaatacaacaagagacatcatcagtaagtcactttaagtatacttttctccagataaccaaccaaacagctcgctaaaaaacacatgtttgtaagtggaggctgctgtgctgtttgtgatgctctagagtcagaatgcggcagggcttcctttaatgatgtgccttctcccccagggtcctggggctggaggctctgaatgcttctattcctcatctccatccagtgccttccctgtctgcatcttcactctggaaacgtcagagggtcttacatatagccttaacacagcaaaaactgaatgaatgaatgaatgaatgaatgaatgaatgaatgaatgaaagaaaccagaaaggaagaaaagaaaatggagtgtgggatttgaatctccttcctgccgtcttgggttcttaggagcccgtaaaagtaaggtcattaacctctagttaatgggggtcctgctttcacatgcaagtcctgataatcctattactataagatcttactacccaccttctcattctgtcaaccacaaaggaaggaaaagaagccaaagcatttattattccatatgtaggtatttgaggttagatttagtgaggctgcccagtgtctgagcaggccagtgataggcgtattacaaacagctagacagacattcgatcaagttccaacttcaagaaaactaaggacttatatatttatgtttgtgtttatatacacatatatatgtggtgtgtgtgtatgtgtgtgtgtgtgtgtattctgtttttgaaaaacatattgtgaagtgctgcaagccccttggccttaccctcattcagggagaagatgtgtgccatcggaaatcaaggagtttgatgggatgtgctggtgggaagaaaggtaaagacagaatttccagaaattgctgaattcactgcacatatctaaacagttgaagctgtatctcaggcagtttggtgacagaaggaaacaccagcaatagaataattaaagcttcccccaaaccacagtctaagagatttttaacctgtttttgccttaccaggatatacaatctgtagcttgtactttctttccccgcacctcctccccgaaaacttgtccctctgagagggggccttattatagatacatagcatgtatgtttaacccagatattttagtcttcccccatcatacagcattaggcatcaaacaaaaagactgctctttttcaatggatctaattgtgcatcacttgaatgtaccatagacagagtccttgggtgatggaaccacaaggaaagccttctctggttagaggagtgaggtcaagaggccaggactgttcttttgctgactctagcatgcaaatgtatgtgtcataagtaagagattcatatgcatctccagtggtgtttggactgttagcatgacactggcagaacgaagctgagattctcctgctagctgagataacatcagggctggggaatgtccctggggcccttcctctctcatttctagcaaggagatccagacatcccctaggcacaaggcaaggcagagcacaggctcctttcaaccagccacagctctccctggatgtcagccctatccatgccttccccagctgcctctggaaggagggcagagaccagagccacctattctgaaagacaaccagctccatgtgccaggcaaagcaagaactctgggcagctacagggaagagaaacagcccatttaatgtgctctgattccctcctggaaagactggaaaattatccgcttgcctcaaatatcttcattaaaaatgcatttaagctgtgaagctctacgaaggagagacctgtaatacatgaaagattagccccagattgctgattggactattttacatcattatggtaattaagctagcaaggctgttgtgctgacttcgacactttcttccatttgcctttgtttccaattcaaggtatcttcccccctctttccatcttccagccttcttcctttcctccccttcctccccttctcacccctccccactaaatgtctcctgggagccttggtgggtcctgcctcatgcatatgcattgcactcggttggattcaatctcccatggcttctctgccaaccttgtcttgactctgcagagtaaagggaagaaattaatggtaattacaaggtgtgagtggatattacagctctctatctgattgccagtgaaaccaaataaaaatggaacgtaatcagccaattattaaaacacagaataaacaaaaggagtcttgtctcttacttgccttcccttgcttactttctatcctcagaccagcaagcctggctcagggcagtgactggagacacccgtgatacactccctgggactccactagagctaagactacacagctggtgtgcagggccaccttccaatgtggaagatggagagagcctgtttgaaggccctccatgatcgtataggccctcctcactctccctctcccacctccccccaccgcttgccagagtcatcagtactctcaagtgtccccacaaaaagaagtggttccatatttctttccaccatttgtaaatgcatgaataacttctagaaatagatgcaaaactctgcactcggtgacattcccctgagaaaccaggagtctctgaggcggtgaatggattacaaggagaaatataagagaaaggcttttcaactgtgacagctgacaggagagtgaagtgtgtgtgtgtgtgtgtgtgcgcgcacacactcatgcactgtcacatgcaaaagcagttctggcccaggggatggtccagtcagctttcttcccttccctggtgacccaaggaaacagtactggaacactgatggtggagggaaacagacaaaaaccaaaaataagtccctccctttccttaacattacttgtgatatgcagctgagatttttaattatataaaagtactgcatgcatatgttcacacccacagctcagttgtaacctgaggagcagctcagcatggaggtgtaaggtcacagtctttgtcattaagtagactggtttctaccctttctgactaatttactagctgtgggaccttatgaagcttacttcacttctccaagtctcaattacctcatttgtaaatgaagactataatcatatccacctcatgtatttgtaaggatgaaatgaaataatgcatgcaaagtgcactttatgaatattcattgttattaaacaatatatgtaagtggtaaatcagactttaatctttgaatgtatttcttcatagattatattgcatgccaattatctcaaaagaataccttaccttacttttaggacttcagagggcacctgagtctacctggccatcctgctataatttcctagtatgtttgcttgttttcttcccctgtccctgttccatttttttctcctagcttcctcaaatctgcacacctccacacgtcttgccatcccttccttcccagtagaacctcatttcataagctcttgagaacatgccttcgcatgggggacaacctcttcttcccactaatgtatttaggaaactatccgcacctgtcctcacaccccttcctcccacttgctaaaaaagttgatgtctctcaaccactattggtggctagcaccttttcctgcaccctagattccaaccctcttgcctgcctgctagggacttcactgctgtggccatcgcctgtctttccccagcatcatcaatatacgcttctctgtggaaccatccctatcagcatccaaacatcatctagggtgcctcacttataaataaaacaaacaaacaaacaaacaaacaaaagcactccctttaactcactgctttctccatttatcgtctcatattttttgttctgtttcacagcaaaacataacaaaagaattctatatatgctttgtctccacttactctcaatccatcttctcttgagcacaccccatcatcccttcatctctgcctctccactgaaatggctccacaagatcaccaactcccctcctatggttaacctgtgtgttgtggcacatgatcgcagcatttacacggatggccatgccatcttccagaaaagcagcctgtatgtcttctgacatgcactctcttgttctgcctgctacctcaccggtggctcctgctctgttcatcactgacctgtcccttcctgctggacacctgtctaattgctggagtgccgtagggttcaatcctgaaactctttcctacctacgtctctccttcattgaactttccctccctcactgatgctgcagcctttccagtttaaatctcagccctgaatgcttactggatctcctcattttagcttattttatctaaaaatcttgtgttctgaaccatcactcatgcctcttcaaaaatactagtcctccttctctggctttctttctctcactgaatgcaactgccatttattgaagccattccagacaaaaagttaatcatcaccattgatatttcgctctttccttttctcttcacatccaattcattagttttctctgctcattgcagctccaacgtgcacctagaatctctctgcttccctctgtcctctctgctacccttcctaagccaagtcagcctcagttctcgcttggacactgtaacggtacagttagtcacactgtgttcatcctcactttttatcatctcattttttgttctgtttcacagcaaaacatcacaaaagaattttatatacactttgtctccacttactttcaatccatcttctcttgagcacaccccatcatcccttcatctctgcttctccactgaaatggctctgcaaggtcaccaactgcccccctattgtttaacctgtgtgttcacacattccccacccagctgtggtctttctaatccaaaaataagagtattcaccttcaaaaacaacttcccgtggctgtaaacttcaattataacaacaacaaaaaaatcaaccacctttctgtgattgtcattcctccctctgtgaccccatctcacaccacttcctcctgctgcctgttctttcaccacaagcccttcagtttatccacctgtctaaaggccttgtatgctcccttctctgtgtctggaaggcctcccaggtaggtctttgcataggaagatgcctcctgtctttaaagtctcagagcagagagggcttctctgatacacaagcaaaaggggcacttcatgctacctgcttcagtctctactatgttgttattcccacccttcatcatgatttcataatatcttttaaattatctacatatttgattattatctgtcttcctttgttagatcatgaacctcatgatggtagtcacctgccttttctgtccatctctaagttttcctcaatttgaaaattacctggcacgtagcctaatttaatgcacatttgtttattacatggatgaatacattacttagagtctaacttcctaactatatatgagcctctagatacccagcaattgaagggcatccatcgcccaaattgaaaaccctcaactatgcctgccctgatatttgagaccacctcactccttccatcaaagccccatttgaacaggacagacctggttttaaatcccacctcctccatttgacagggtgatattggacacatttttgaacccatctatgcctccattttctcaagaggaaaatgaggtaataatatatttggaaaactattgtgaaggttaatgagataaagtttgtaaagtaaccaggtctggcacgtataagacattcaataaatggcctttcttctttcctcaatataaaggatttcagcttgccacttggaaggcgggttgaaaatacaactctaattaaacaaatttacacccatgtgtgaatgactcttagccctttagcattcccaggggaagcttattaacctaaatgcattattaattggtagaatgtctgttagtttaacaaagtgaagggaaaagttccagtagagaagggaatacacctttgggttgggagtcctagaaacaaagctaaggaatatgcccctgggccgatggggtcactgcccagtcaattactcttgcttttcctgctgatgtttatttgtttgtttgcttgtgtttttctctttgtccatgtgtgaaccccgctacctccctaaccactcagggttttgtatgcttttccagactctttcagaataatagtttccacaattattcaaggtgcaaagacgtggctactgttggcatgtagcagttccatggactgtatgtcctgtccatctctgtgaagagtctgggtagttatgggttccacacagataattatgtgcacaggtatgcttttctgtgtgcttctacacccttaagtatgcatgcttgtctgtcacacagttagccactgatcagaaattccagtacaaaacaagctcctgttggcttggaaactatgaaaaatgcatttgaaagagcaagtttttgatggcaattgtcattaactactttatttccaaatacatttcacagtgcatttcatgccaggaagggtttcttatcttctgaactcttagtctgccagtctgagtgggatggtgacagtttcctttgaacacaagtagtgaaataacccccagtgaatggcaacagcaagagaagatgcaaaggggcagaggtgaaaaaaatgtgaaaggcatccctgtttacctttcagacactccaacagccatgtgacctgtctcaagattattccatagagcagaaaagaatactttatgtaacatggccatagcacttccaaaactgcctcaaggttttttagctatcagtgatccacttgtctgattaaaagataattctcttaatttaccctatactgcattatgaccacaagatttcttatgcagtcctgcctgatttctctgagtcttggcaatagataagaaggtatgtaatcatacagaaggtggtatttgttattactgttactctaagaagctataggattgaaaagggacacatttgtatgaatacacacaaagagtatttatctgaatacttttagtgtccataagtagcctttaccaggagccagggatcctaaggaagaaatataggtataaagggaagagaagggggagacagatatatagaacagtaagtctccaaatatctaccctatcagcatcagatccttcttagcactttgtaacttaatttgagatcagaatttctcttgttccatggttgtttctttttaagaacagaaagttgcctttttaaaggtctataaactaccaagataatgagaagacaagacataggatgggagaaaatgtctgcaaaacatatatccgatgaaagatatatctcataacagatacaaaaactactctcaaaactcaacaataaaaaacaattgacccaattttaaaggggagcaaaagatcaggtaccccaccaaatatgatctacagatatcaaataagtatatgaagaatgctaaacatcatacgtcatgggagttgcaaatttaaacaatgaaatatcactacacacctacttgaatggctaaaattcaaagcattgacaacaccaaattctggcaaagatatggaacaataggaactctcattcattgctgatgggaatgcaaaatggcactgccattttgggaaacaatttgacagtcttttacaaaacttaacatactcttactgtataatccagtaatcacactccttggtatttacctcaatgagctgataaagcatgtctacataaaaacctgtgcaccaatgtgcttttgttgttgttgtttttgttgtctgtttgcttgtttgttgagatggagtctctccctgtcacccaggctggagtgcagtggtgtgatctcagatcactgcaacctccgcctcccgcattcaagtgattctcctgcctcagcctccccagcagctaggactacaggcgcatgccaccacgcctggctgaattttttttttgtatttttagtagagacggggtttcaccatgttttgatctcctgacctcatgatctgcccgcctcggcctcccacagtgctgggattacaggtgtgagccaccgcgcctggcccctgtgcaccagtgttttatagcagcttcatttataattgcccaaactcgcaaacaaccaagatgtccttcaataggtggataggtaaatacattgtggtacatccaggcaatggaatattattcagtgctaacaagagatgagttatcaaacataaaaaggacatggagaaaaaataaatgcatgtcgctaagtggaaaaggccatgtgaaaatgaaaatcatatactatatagtcccaactgtatgacattctggaaaaggcacaattatagagacagtagatagatctgtggagttggggtgggggcaggaagggatgagcgcgtggaacacagaagacactttagggccataaccacccggtatgatactacaacaacagatacatgtcattacacatttgccaaaacccagcgagcgcacagcaccaagagtgaaccctaatgtaaaccatggacttttagttgttaatgatgtgccaatgttggtttattgactgtaacaaatgaaccataccgatgcagaatgttaatggaggaagaggctgggtgtgaggaaggaggctataagtaagaactctctctattttctgtttaatcttgctaaaacagctcttttaaaaaaaaaagtctatttattttaaaacaatactccatgaaccagaaaacaaaattatcctattgttcaccaacagaaaaaaaaagtggaatttttttattgtttaatatttctttcctcatgtcataggcaaatgacaaacttttgggtatccgatgttggctagaaaaattctttcttgccccaaagaaagccagtgctgatactgaagttgtctagaagatctatgtgttattgagagatgacaggatgctcagtgaatttcccaaaaagtgcctaagtaggcaggcagaactgggcagagaatatgatttcactggctggccgtgggctggacactgtggcagatgttgaagacagtaggtgcctcgttttctccactcagcagccttgtgaagagtattctcctttgaaagatagcagtgtggaggaatagaaaacttaaataactttcccaacacagcaagaaattaggagaactgacattcaacatacagattactccaactcacacattactcaaaacttgcctgcttccatcagaaggtttgagtcaggggatattatttattctagtattagaagaatccagaagaatccaagttatacttgtttatgctaacccaagtataatctggtatctctggagggaccaaattaaccccaaatgctgatcgtactgtgctaactcaaacggaaactggatttaaaaatcatagcagctaggatatagtaggtgcttatcatatgctaagtgtctcataggaattaactcatttaatccatattgaaaccctctgagatagagaccattatttctatctgacaagtgaggaaactgagcatgaatgaacaagtgaatattactgaatgagtcaattaatgaagatggaaacgcgggcaaggaccagtacaaagcacaagactgaaaacgtacatacagaagagctaccctttgcagacagtgtttgagaagggcctctgacttctcctcttgactcatctcctgaggaaaagcaaaatggtcagagacctaagggcaaaagatcatgcttctaaatctcctgtccggtgttggcctacattagcagcctcatgtctcagctccaatgggatccttcatttctgcctgcttttactgagcatattgatagaattcaacagaatcctttctgtttttgggggtttgctttggttttctggttatagtcaaaatccatcaggtaaaaaccttcctcttttagaattaaagttcacagactctatttttctcatgtgtttctcataaatggtttggatcctctcatttggggtccacatctctctatacttgttattaactgtgtattaataatatacttttaatattacctctactttttaatattgtgtattggtaacccagatttcagcccacacattataggcagagaaaaaaaattgctacattagcatttactatagcacaatgaatccggacttgtcagcgtgtatggcaccgctggtttgcaatagccgaatagaatcttatgggattactcttttcccccaatctgtattattttcatgtgggtatgttgcatttgtaccagttcatgtactgctcctttatattcatcaatttagcctatatcatgttttttaatcacttgcccataaggttactgcacatctggtgtttcttccaattactatagagatcaaagttaaaccatgccaacttctctgagctttttgatttccccatatggtaagtacgtgattcataagttcatctcaacatacccataaagcggtgttggactctattctctagctaaatggaatcatcctgccttgacatgtaaggttaggactggcagagcacgtgaaataccaaacagtggccttgatttgattaaccagctcacagcatgagcccctccctgcactgggacatgctaccctgcagtgtcggttcaccaggatgccttctgcagttctcaattatcatcaacctctttctacttgctctttcctctgcaaatatcagaatctaaaatcataatgcccaattacagacaacaccaggaggtgctggctcatggatagaacccagagagatttctaaagagattcatttgcagaacataaccaggaggagcagaggtttaggagcggttgccttcctctaaagaattctgcctctctatcttttcccttaaattgtacatgtgtcatacctttctaaggacaagaaacatacacgcgtgctttcttcaaagtgaaaaggggaaatatgttttaatataaaactacaagggaatgcatctcttttcccccagcagtcttgatattcagcaatattgaggaaaggaagtgcagaagaagcagaactaaattcaatagttttgatgcaataggatatatttagaatatgtctatgtgaggcaaggtctctttaagttcagaatcaaatttctcccacctgcttttttttttcttataactgagctaccgtcatacactcagataatgaaggcttaattttgctcactgactcgtatatcccagtatcataaacctgtctcagtacatgtacatgaaagcaattgggcaaatcacagcaattacacttggcattaaaaaaagaagatccacatgaaatacaagaggaaatttcaaaagcataaggttaatacaactcactatcgcccaatgaacagaagtccaaactccaaacaacaaatttgtgtttcaatgctcatttagcagacaatgaaaggcagtgattcaactcttggaagaaaccaggtaaaatgattttcagtcaaaggggaataatctacattcataagcccacaggtgatgaggcacccccaccatagctccatcacaggcgatgagaactgctattttcagcctcattaatgcagctgtgtcagtttgtaggtgaatcagtcttgcttcatcagacacatcaacagccagaatccacactgccattttccctctacttagacatattttcttaattgccatctttaaatagacttgcttcctcctgcctctccaaacccatccatcataactggtaatagggccaggaatgaccactcgagacattttcacttgaccctctctcctgactccctctcccccattcagcatcccccaacacaactcttcccccttttcttccctctcttcaagtttcaaacactttaaagttaggctgtcaaatttgtataagcacagaaagccctgtacaaaccttgtggcaatagagatctttattgtcattcaaggagttttctttttgtcctgtcttacaaaatgtggtcattaaacagcaatcactttgtctttcccagtgcacctcctgtcttccctcttcattttccttcttttgctgtctctggggctccagcaacctcttaccctcccttcaaggagaagcaggcatgcctcaagtccatcgcacaatgcttacctctcttgtgggacatttgctgcatgacaactctggttcaaagaatgactgtgtgtctggtggtcctgttgaaccacagccttctacctgcaaggctttcagtagtaaaggaatccctagtcacatcccagaagtctacaaccttcagcatcatcaaaaggcagttaagcatctaattacatgttccttcccaacctctttttttttttttgcttttattttaatgaaaaaaaaaaatgatagtgtacttaaacttacagaacgaacagtccaaagtaaaggaagaaaaggttaaaccaacattctttaaagctggaagcctaaacctcaaatcataatgaaagagacctagactatgttaaactttagaatctttctctgacttcctcattccaaccaaagaatagatatccttcatttacggacaattattctgcttatctgggccatgaacagacttctgaaatgatgtgcaacttacatgcacacacatacatctcaatagcattaatcagattttccaaaaaagccaatgctttcttttttaacaaaagctcaaagaaacaaaaacgtgaaaaaaatgattcatacatatgcctaatcatgtatgctttttacaatttgcagtgagcaggacttttcaaatacggtcatgtgtcacttactagctgagatacattagattccatctttttgtaggctcaacagagtgtacatacacacactaaatggcatagcctactgcacacctaggctacacgggagagcctgtcactcctaggctacaagcctgtacggcacgtaactgaatattacaggcaactgtaacacaatggtaagtatttgtgcaactaagcttatctaaacatagaaaaattacagtaaaaaatgtgataaaaagatttttttttaaataatacacctgtatagaacatctaacatgaatggagcttgcaggactggaaggtgctctggctaagtcagtcagtgagtggtgagtggacattaccagttagtaccggggactttataaacactactcaggcttcactacatttaactttttaaattttctttcttcaataataaactaatcttcgcattatgtaacttttaaaatatatatagtttaattttttaacttttttgtaataacacggcttaaaatacaaatttgtacatcacagctgtacatatatttcctttctttatatcctattctataagcttcttatattttctctgttttcactttttagtctgttttgttaaaaactaagacacaaacacgcacattagccgaggcctgcacagggtcaggatgatcactatcactgtccttcacctccgtatctcatcccactccaagagcttcaggggcaataacacgcatggagctgtcatctccggtgctaacaatgccttcttctagatacctcctgaaggccctgcctgaggctgttttacagtgaacttctttttaataagtagaaagagtactctctaaaataatgataaaaggtgtggtgatgtaaatacataaaccagtaatagtcatttatcatcactataaagcttaatgtgccttacataattgtatgtgctctaacttcataagactggcagcacagtagatttgtttacaccagcatcactacaaaaatgggagtggtgtgttgcattacaatatgacaatagctatgatgtcactaggccataggaatttttcagctccattataatcatatgggaccaccattgtatatatgcaccccatcattgactgaaacatcgttacgcagcactgtatttaaaggcaaggtaatccagtaagagcatttaggatggaactacagtttagggaagaagagtttaatcagaaagagaaatgaagtatgcaatagcaaaaacaccagttcattctggcacaaaaagtattaatagtttagaacaaaaaagagatgctaactcttgacctatgggtgcccttcttatagacaatttttgagtaaagattatgagacttaatgaattgttattttacttttcttggtcgttaaattttggctcatagctccttttctgagaagttggctgatgtttgattataatccatttaaaaagcaatgggccttctttgtaaacaggcaaaggaagagaattacctattgagagaggagatagagccaaaatacctttaaggactttgggattcaactttaacctttttgttccactcataccaccttgttaaaattttaccagtgcaatgacattaatattattgaaaacagacttgggagaactccctccccagtccgcgaatgctaagtcccatctgaatactaggcgtaagcttctgtattcatttcctggggctgctgtcacaaagcaccatcaactggatggcttcacacagttctgaagggtagaagtccaaaccaaggtgttggcagggccatgcccctctgaagcctctaggggagggtccctccttgcctcttctagcatgcgacagccccaggccttctttggcctgcggcagcacagttctaatatctgcctctgtctttacagactgtcttccctctgagtctgtgtcttcacatgacattctcatctctttgtgcatctgtgtccaaactcccttcttcttataagggtattagccatattggattaggatgaaccctgatgacctcattttaactcgatcacacctgcaaagaccggatttccaaataaggtcacattcacaggcaagagagcgtaggacttcaacatatctttttggggaacaccatttcacccataacaccttggtagctgaaacatttagcagtgcaatgacattaagattaaaaagacacatttggggttgtaaatatgctactgtgaagtttgtaattacaaggagaggtcaattagcccctcaaggctaagtcccccgggtggtggcactttgtaaaaaaaaaaaaaaaacatggaaaggagggggaccaccagcttgccagagccaggacttctactctgcagggtcataaaattgatttcatcagctccacaaaggtggccaggctgaggaggattgattcatgcccacctaactgacacaagacagatttataaaccagcatgatggcatattcactgccagtgaagagcctccttggcatgagagaggtttcatattctctggccatgcctttctcctgggcacatccactcaggagagcagactgtagatcagcagactgctgcggaagtgtggggttagtacaaacgaagtgagaaatgtccttaaaaataccaccaagttacaaagtggaaagaattgcattctccctttcaggaatattatgattaaatcagaagtcagtactgagtacacagaaagcacttaataatgcctcctgaatacattaatgaactgagaccagttgtctagaaccagagtctgtctctccctagtcagtaccagtggtgacagttttctgttctcagtttgctttttctagatgccaagcagcatttacaatttgcatttgttcttgcattataggggaatgtcatctgtctctacccccaacttacaatcaagtcatggtgggatacctgtgttttacttatttgtgaatccctggaccctagaagaggccctaacacacaggaaacatctttcaccaccttgcttttgatggccacatacaactcaaatgcattatgtcaaagtccaagtgaacggcggtgcccttatgcctctttcttctctttgtcacctctctttgatggtgacaccactgtagactaaatatctgatcttaaaaaaatccagaacatcgtcctgtatcactttctcttcatttcctatcaataatcaggtgggcctttacatgtgctgtctacttacaaatatccatttttgttgttgttgtttcatgttctctatcctttggtttggaaatggaaagtggaagaaattcgctctctaaaattggatcccagcatgcccatccatgtgctgaatactggttcctgaatcagggtaggtggtaagagatgtatttcaaaatgcgaaattaacagtgagaacataaacggcctccatgtttcaacagggaacttaggcagacatatctgaaaagcttacaggattagacacctgtatccatggtgtctaatccacagataaacattatgttggcttttcccaaataatgaaaaatacacaaagaaaaatgctgaacagaatctcatcagtgttagaaaaataataccctgcctgctcagcattatctgttatgtgagagtgtgttctacagagaattatttgtacagcatgagccagctctagtagcccggtgtgacttccgtcccctcaggattctctgagaaataacataactgtcttaaggctctgaagttcaaaatgtatatgatatgtgcatatgagattttaatggcaataattaaaatattacaacttttaggggaaccgctggtgttacttcatctgctagaggataaatttaacctcattggattatgacagctcaaatcaagagttttacgaatattacactagcatgagtcctcttttcatcttttggtcgccattatattatctgctaatatttgttctatattaatacagacatcaaaggacagataaatccaaccactgtgagctagaggcaaggatatgtacggcatgactgaacaagacacgaaatttatttaagccccagcggaaaaatcaatgggtaaggaaaatctagaccacggaaaagagcagggggtggtgctgtgagtgtcgggcagggagaggtgaaagcgctggcatcagagaaggcagatgtagaggtagttttggaatccatttgataaccagtgatcctacatatgtaaatgccaaaggagccacaagaaaatcaagtgaacgatcacagagggaaagtgcgtgagaccaaaaaacgagaagtggaagtgtttaaaacagtaatcggtctgggctggatgcagtggctcatgcctgtaaacccagcactttgaaaggccaagtcgggtggatcacctgaggtcgggagttcgagaccagcctgaccaacatggagaaaccccgtctctactaaaaatacaaaattagctgggagtggtggtgcatgcctgtaattacagctactcgggaggctgaggcaggagaatctcttgaatctgggaggcagaggttgcggtgaccgagatcgcgccattgcactccagcctgggcaacaagagcaaaattccatctcaaaaacaaacaagcaaacaaacaaacaaacaaacaaaacagtaatcatgacatcctaagaagagaagagactttcagtggccttctacttccttcacttatccatggacccattgtgtcatgtttccatctagccactggtttatcaaataataaccaagactccacagtcagcatctgtcctaaaacctagctatagggggaaaatgataggacctgctcctcgaggaatgcactgtccaagaggaggtgaagaaaaatatgttaacaaaccagagaaagaaaaagcatgggtcaacgacatacatacaaaggtgtgcaggggacaggtgtgcacatcagcaaggggccaaggtcagttctccctggggagaggaaacaggaaagactccacagaggagatgactccagtgctaagactggaagacaagtaggcgtccatgaggcagactggatggacagggcatggcgggggaaggcgggcatctgagtggaggaccactgtgaagcctcaggagctaagcgggtcagtaccaagacaggccctccctcctccctcactgctcagggtctctgtaaacactcgatcttctcctgcctttgaaggctggagggcctcacgttcaatgccaggccgctgtcacgtcatcctagtttaatttcctttataggatttatgtaaccttatgatatgtttctggtttatttatttgtttacagattgcatacggcccaccttgccctactaatttgtatacatgctgagaggaagacacttgtccatcatgttcactctggtattttcatgcctaaaatattctggctaaatgggaggtttccagcaaatacaaactaaataacaaaacatgtttattaaagcctactgtgggccaggcaccatttggggcctaggtaatatggtccttgccctcatggtattaacggtcaagagaaacaaggcaattaataaacaaataaaaataaataaatttgaatagcagtatattctgcgaagaaaatgaaactaatggaataaactaaagggagtaagggttgacagggctactaagctacatagggtagttaagaaaagtagttccaaaagatgtatgtcaagcagacatttggcctggataaatgacacagatcctgcctacaagtaattcacaatactacagaagaaccgcctgtccaatggcaatgttggagacagaactaacagttgtgaaaatggattaataactttattatataagactcttgaaagcattgctggcataattttatttctgatatatgtatggtataacacagtcacaagctgctataataaattcattttcagaaaatcgacttttaaaatttatttttttattgtgcaaggactacattaatgcatacccattgccaaagagctgaacaccacagaagtttgcaaagtaagagagtggaagtttagagatcagagtcattcatggcacggccgccgccctatgaggaagcagcaaagctccctgggaagcctgtctcaggagatgactcagcaccaggcactgagcacccccgaagatgggaaacagtagagccgatatatgcttgttaatttgtggcaggaaggaggtccttaagaatttgttctagaacattaccaagtgcacaccaacagagaaaagtgttgctggaatatttctctgcaatacactttcccgtgaacaggaaaactggcctcgggaggaaacaaggggcatgagctgtttagcctcccaaacaccgcattttcctcaacagaaaattcacagaggagacatccacttgtatttccccacagggaaagcattttcatcaccttcatagccttagaaaccctgtttgtcttgtcagaaaaaaacagacctagcagagtggtaatgagaatcttggaacggccttgggaaatcaggtgggacacaggcctgagccccactcacgggctgcatgacattttatctcggcagagaggagcgacaggggaacgctagaaccctgacttcattgactggagctggtgaagatcggaaccgcaagcatgaaagctgaacaccagggcccaaggacaaactcgcgactccttcccatatgggaggcgcttggctgcaatggccgctttccttaattttccagcatgcttaaattaggtttgctagagctttataataagtttgtgcaggaggctaattaaatgcttcttgccacccattccatatcaattccacgtgaaatgaggacaaggctggagaggactgttcctgcagtctccagggctgacccaccacactgctgttgttgacgctgattatttaatctgaaatccttcctccactgaacttccctcctccctctcactctctgaataaaatacggatcagatgctgcaacattgctattcttaggagcaacagatgcaaatatggttgctttttcaattattcggcaactgatctgatggttccaagacagaagctaattaaaatctaattgaaataaaatcatttccaattctgtctctcccttcgtcgactgcctgagtggagggtttcttgctttgtggacagagtgtcttccgtcccattaagacttccttcggctttgtaaatagccatttgtgattatatcataaagtgtcttggtttgctgggaggaggtccaggcggggaggagaaagcccctgggaaaatcacaggaaggatatttacagtgaaaatgggaggcaaaaataaagaaatgaggacagtggaggaaaaatacatgagaacaggggccacagcagccatcagacaatttaggataagaagggacagggaggcagggaagccacagagcctgacacaaaacttctgacggcatttagcttgcatgtgtagggttggcctcccctgggtgtttttcagatatggcaagtagtcaccgatatttaaagatcagaacattttacttaaatattcagatttctggttgcctttgaaatattagaaaaatgcagcagccctgtgtccgaattcccagggcagcagctgacggggccccaaagcagctgcccctttgctgaggtggaaggcgctgggcccaggcttgccagttcccactgggcccgttttgctcattctcattcatattggccctgcaggaatctgagtttgaagttctgctagtgggtggaaagccctttagagtcaaaagatataggtttgaatcagtcctctgctactgataatgggggcacatggggcaagtattttaacatccctaaacctcatttccctaatccacagaaagggtgtcataaaattattatcacaaggttgctcaatccgaagcgttaatctgtctttaaatgctcaggaaattacacaacgttattcacattcgcttttataattttatccttttttccttatgaagggtgggaattctttttcaggagaacagtaggaaatagaaccattggagaggctggagaatgctcgttagaaaaatgttgatgaggccgctgaaaaaaaccccacacagcagcgccaggccaggaagggaagaacgtagtgagagggaagcagatgcggcaaaaagaagagcccagggcccaggtggacctccagagcgagctcacatgggacactgcctctcaggggctgtgtgatcttagggatgttctgtaacttctctaacctcagagtcgtcatcgttcaagagggaaaaagaatacctatcccataaggctgtttgcaaatggagggagaaacgtgcctataaagtgcctggcacaagtaagggttctataagcattagccgttaaagcagccattaacaaatgctgcaagcaattatccaagacttcgcactgtgctagggtgagagtactccccacaacccgaagtgccgcactcttgtcctttttgaaaatatgatgcagaagtttataatttcttacctagcacttactgaccccccggcccccactaattattcctttcactaaagaagagaatggaaagacaaagtctaattgaggagcaggagagtaaacagcagttgtgaactttcaagacctagatgatctctagcccactgtagagggccaggcctgccaaggcccaggggggttaaaaatgagattctttgtaactgtcaatcaaaacattcaaagattcccccgggctaggggaggaagaaaagtgtgtccctcaaaaatacaatctaccttcagttgaggataggcaacacccatgttaaccatttagaataactccttttgaggacgggcctggtggctcacacctgtaatcccagcatgttgggaggtcaaggagttcgagaccagcctggccaacatggtgaaaccccatctctcctaaaaatataaaaattagccaggtgtggtggtgagagcctgtaatgccagctattcgggaagctgaggtaggagaatcccttgaacctgggagcaagaggtttcagtgaaccaagattgtaccattgcactccagcctgggtgacagaatgacactctatctcaaaaaaaaaaaaaaaaaaaaaaaaaaaaaagaataactccttttgatataatagtttcaacaaaggacaagatatggtcttagttagacccaggtcaatccatctgcatgctattgaaaagagaacacttaaaattgtatcttaaatgtttgaggtgacaggctctcagtaacacaggggaaagttcagaagccatggaaatggagtggaaatgacagcgattaaagcaagaaccactttcctattcatgaaattggctttattccctcaatcaaggtccttcagatgtaaatgtgtgtttctgtaaccccgtttactactttacccccttccttccccaacaccgatgtagccacctagagctcccataggagtctgttgtcaagtcttcctctcacgccgcacgttccactcaagtgaattattcctcattattaatccttgctagaggtcgctgagggtcacgctgatggaatgatatctgtattaacgggaactcagggaagctgtcaccacattactcagcagctctggccacagcctcccctcttcccagcaatattcgcagtagcttaagggctaaacaaacttggtttgaggaccaaagaactgaagccatttgcctctgtgctgctgttaacctccgggttaggaagcagtagcccttgcagccctaagggaaaaccctgctgacaccagaatttaagaaacttggaactgagtgttggatagttcagcaatttaatgtttgcttgtcagagttttttctcctctaggtactattttcaaatcttagccatacaaatggaaaagatttctctcaccatacccattcaaggattcatgccagccctggtcacaggctaaggttctgtttagacgcactgccaaagccacctgtacaagagtggacacacttaaagctgaatcccatcttgaacatgaccccgccaccctctcatttgacacatgagatttacattcaccctaaaatgttaggtgatgctacgacactgaaggtgagaaaaggtgagtgatttacacacagtcatcagcctaagatgcttgctcccaaatagacagacttcaaactcgtcatgctttggtagcttttagaaatttgtgaatcaattaaactaagacattacattcatttgtagaaatcagttgccagagactagtttcattcttttacacttctactgttttaaagtgtggttcctttttctttctttttttttttttttgagatggaattttgctcttgttgtccacccaggctggagtgcaatggcacaatctaggctcaccgcaacctctgtctcccgggttcaagcgattctcctgcctcagcctcctgagtagctgggattacagtcatgtgccaccatgcccagttaatttttttgtattttttaagtagcaatggggtttcttcatgttggtcaggctggtctggaactcctgacctcaggtgatccacccgccttggcctcccaaagtgctgggatttaaagtgtggttcttcaaggtgggcatccagtcacctggaaatctttttccaaaataagttctaccagcaagattctgatgcaacggttctagaaaagggtactttggaaaaactgatacatacccaagaaagagagtcactgtttaaacatagcactggtgttattttagacgcatgtgtgtatgtgagtgcatgtaaaacatctgtatccttggcatctgaaacagagcctggcaccaaaaaaaaaaaaaaatcaattgatatctgttgaagaatgaataacaacttcagaaaagtacatcagtctttataaagctcatcactgttattgagattgtggcagaaggtctgtatgtgttagaaaaatctatcatcactgcgaaggacaggcgaatgctgccgattgtacctgaccacatctttgtagattctgctgaatttgtgtgatagtttcagatgtatacatacatggagagattaacaaaggattgttaaggtatctgtacctgcactgggtttcaaataagtggttgatatggtttggctgtgtccccacacaaatctcatcttgaattcccatgtgttgtgggagggacctggtgggaggtaattgaatcatgggggcaggtctttcttgtgctgttctcatgatagtgaataagtctcaggagatctgatggttttataagggggagatttcctgcacaagctctctttttgcctgctgctattcatgattcatgtaagacgtgacttgctcctccttgccttctgccatgattgtgaggcttccccagccacgtggaactgtaaatccagctaaacctttttattctgtaaattgcccagtctcgggtatgtctttatcagcagcgtgagaaagactaatacagtggtgatccaagaaaaaggagaaggaatcatatctaaacaaatgaacccatatttgtgaaaacacggagtcaggaaaagggagaacagtccatttggaagaagtagagtgagaacaagaggaagcaataagagatgaacttgcagaggccttgctggcttgggtgcatggtggggggaggtatatttgtattatgtagggaatgacaggaagaatgacatgatcataattaagtttcaagaagatccctacaaaaatatattgtaggtcagaaagacaaagggcaagaacagtttgggaatctttataattagttcagatgagacatgatgatttagagtatagaccagggctaaaaacattttctgtaaaggaccagataataaatattttaggctttgcaggctatatattctctgtcatcactattgaacctgccatcgtagcatgaaaaagaactacagaaaatatgtaaaacattgagcaaatctgtgtccctatgaaactatttgcaaaaacatgtggcaagtgagagttggtttgtagcttgtattccttctgggtcactgcacactataagtggacctatatagcttgttaattcacaagtgaacctatatacttggttaatcgctacccacattaagagagagaaagaacatatagaaataaaaggaaatgtaaaaaaaaaaaaaacctattttttttttgtttttgtttttgttttaaagaaatcaaagacataactgtatggatagcaaacatgtgttcacagccacaaatacacacctctttaattccttcccttggtggtgtgggaccaaggtatgtggggaagctcatggctgggaagccacaagcagatcactgtaatttgactctagctcgttacttggcatgattcctggtggctttctttagtcatcagtgcctcatacccagggtaaatttatttgtgattttttttttctcctaataaagtcagcacttgaatttctgcaagtagaacagccctgcattgccatttaccgcatgcttaggccactcagttatttacagatgatgatggcaaacgcctttgaacaacagcttaagaaaagcatctttagggaaagaaaatatagaacaaagcaccacatttcaaactcaaatactctttaaaaatctgtggaatcatttcaaactcaaatactctctaaaaatctgtggaatgctatctctgatagtgtcactacactgacagttttcctcccagtagctatggggagggattagctggcaggatcctcagatgttctctgggatcccaggatgggagcccttcaggtggataatattcgagttcccaaaaggggccctgaattctctcactctgtcctgtctcccaggtttctgtctattcgcattcaacacagctttcctgaaacttcttatatgctcttccatagagattcccgtcactctgtcactattagagacattgaaagcttactctctctgtctttcactctctctctcttctctgttcctcccctcctacattattattatttttttctagtctagtaatgatttgaggtttatttgccccattccctgctcagtcttccatgtggcgaaaggcccatcctgatgcctggctgggatacaacgagggtgggctggatggagcagagccacctgtccccagtgtggacacttaactttgacttttttcataccatgcttcagaacgctgagagcaatcccccagtcaccatcactcctttacagtgccacagaaattaaaagttaattaaagaaaagggcaggacacatttccataaagcatcaaacactcggggggaaattcatttacagtctcctttatagctgccgttgatcaggttcttccttccagggttacagagaactccctggaaatagtgtctaggcttacaagttttacagccaagggcctcattgtctcaatgtactgagatggagccacataaaacttaaccagcaacaaaggctgagcgcccccactcgggactgctaagtgtttctcacagcagcctgaaaacactggtataaacatggttcccaaggtctaggagtcaactacattggagttggcagataatgtcagagtggctgggaaataatttattttagcctgctcccatgaagctctttttatgcctccctcataaatatctgcttcctaatgaaaatgagaagaaatgtgttttaaatccctcaaatagttaagaattagaggaagtctaggaagtagcttttaactccaccacggtaacattcacactgaaaaaatatacatagaaatcttaggattgaagcagctttaacattgatctagtccataacctagcatcttctcctgccctgataaatgcttgtctggtcattggacaataaatgattgttgagaatttgctatgtgacaggcactgtgtgaaatattagggtgagaaggataagactcccaacatgatctactcaattttgtaaacttctagtgacagggaactccctaccttcctacttgggagagctctgtatgtctgaaattatcatttaaccactcacttagcttctacttgttgatcctaattctattccttgagatccacatgataaacttttaaaattgtaatataaggtccccccagtggagtctaattctccttcttgacagattaatggatagaaaaggtagactacataaagatgttccccccaatgcctgtaaaagcatgaggctatctgctgtctaatgggcaatagataatatgatacatcttggagagtttgcttatttgtcagcctaaaacatctctcagaatctgagggtaagcacagagggtaagatcatcgacccgtgacaactgaaggtatcttgctgcattctcatcctcaaacacaggataaaaagaacgaaaaccagtaggaagacaccttcgaagccataaatctctaactctatattattttgttaaatattttctttcttttttgttgacatgcttttttttctagatagatgtatatccattgcattagagtaagaggtataccttcctgtcaaaacgtccgtggagtaagactccagagttatattaatttgtacgtagttattcaaattaaaaacagcaagaaagaccacatttctgaacctgggcctgatagaagactggaaccctatcttctttagattataataaatgttagtgatagtgatttttaatactcatttttttcttctctatgcatcaattgttctgcgtaagtattctcatgactcctaaagagggaagggagagcaaaggcaggaagtcataattggatcttcacaacaagtttctcactctctttcaggaatctcagataccactaaaaatgctgtcttttggtcaggtatctgagcctgaaattaaacttttgaagtacagtctttggaggattctgtttctcttttttctctccttttagtattgatttttctcctttcatttgttggtgctacttcttttcttgttgctggagatttgttagagccacatttgtacatgaattcttatttatgtttgttttgtacataagcaccagatgcttcaagttccagcttcccaatcagtcaagagagttctgtagaagtccgggctgtcactcagaagaatgaggaactcacccacctctcctgatcccaaggcagtttcatcagagacacagggcagattgccctgtggacatggacagtgaaattgatcaagtccctatcgtattgagaagaaaaatgatataagcatatagccctaatcaggaatcaggaggattaactaaactttttaagatggcagtaggaaatggaaagaaagtttgtaaacattcacatgtgagatcacgtctctcaaaagaaagcactgaatccaggtatcccatgagagcttgtacttatgcctgtaaaaaattatactgctattctacaagtatgatgctacctttaaagaatatgctccctgctgtgaacacaatttctacaatcctagaaaggtgatgggatggatgatggttttcactgtggcatattatatattcacatatacctgcctttccactcaccttggaaaatagtcaagtcaaccttaagacattccaagcaagctcattgtgcaacattctctgccttgtggatgcacgcagaatatttggcatttctctcaagtcttgagatgcctatgtgtgcttgggctctgaccacaacatctccagggagacatgctgaaagcagtcctcctacttacccataatttttgttaaagctagaaaggaagaattcatgactggaccaaattcgtatgcagttttgagttttatgagtatgacatactagtcagcctgacattacacctttcctgattcaaagtaataagatagtccataaaatataaggagagacctggaatatccaaattcttgtccttatgctgcctctcatcagctgttgatctgagcaaatcactttacttctctgcctttcatttcctatagaatggtaacaatgacactttttcctttttcacagagtaattgtgaaaatcgtattagatcatgccaatggaaaagctttatgaagtcctctacgaaaggcaggatgttgctgggcgaagttggtgaagataaatcactagctccagttgttctgtctctgccttggcttcacacacaatcacagtgttggcaactgatactgcttaatgggaccacagcatgatgatgacagaaggaaataggatcagaacttcttaggcttttgtgccatactactaaaatgtagttcgcttcatgttaaatagtttacaatgctcatttccttgcattgtcttgttctatccattcccaagcataaacacaactttctccattttatggacaaggaaactgatgtgaagagaggatgaataacttgcacgatcacattattgtttattagaacttaggagttcaagggtaagatttcatgcgatctagcgctatcatataaagacaccaattgcctatgcggtttcctcacctagccaacacatgttattgaggactaactgtaggcccaggcattttggtaggcactgaggagaccccagtgactaaaataagcaaagcttctaccttcgtgaagtggcagcatcttctggaagaggagctgaccataaagaggcaaagataaaattatgggagatgtcaaatactgctaagtgctatggagacaaatcaagtggggtatatggagggccaggatgatgaagatgctgttattttatactgaggacactcccatataagaagatcacctgcaagtagagacctggctaaaatcaggcattaagccatgcaactatcttgaggaacagtgctctcagcagagggaccagtaagtagaaagcagacacacagcccttgaaagggacccagaggacatggttcacagctggcaaggaaggcagagtgggcatggggtcagccagctgagtatgccacatgtaaaccggggcaaatgaggccacacaccgggcaggcattgtgccagtcctcatgggccaagtgcagacagattttcttctgaatgactgtgaaactgtgtcatggatctctaagttctttgctgtgtccactcgagcagatgacgcaccagctccttccatcctaaccatttaaacctgcatatgttagaaatttccctaaatactgtcatctttaacctgagagtaaggatgggaaagacaaactttcctgtaccaactagaaagtttatagtgaagtgtgtgcattttatttcaagtcttgtgtttagccctccctctaagtgaagtaatccttcaaagaggcatcctccttactaaacaaagtccctctgggaaacctcctgtgtccatcaggatgtgcatctcatggaaggaaagcgagccctacttgccctcagtggttatgggtgactgttcttacctccttcctgtgcaccaatcaggcgccatgtaacatggtccctagccatcttgagaaattagatcaatccccctttgcccattaaaaggctcataaacatttgcagcatcaaattagtgctggtagatttctcaaacttggaacacgttaaaacgcacagttgggtaacaagaatcaattagggccagacagggtgttggaagttaaacaatttgtctattttatgattctacactgtggaaagggtgtgtgtgtgtgtgtgtgtgtgtgtgtgtttacactttagttcagatttaaaatcactcatgtgtatagtttgtataattcaattcatgattagagcagaaactacccacaaagtgagaggttattttttgaggagtcagaaaaggcttgtatttacaactttataatttgtaattaagcttattatagctttcccacctcctaaacctcagtcaactaagcttaaattcagacaggaaactagcaattattcagcaaatacactatgcatacaataataataatccagataaaaaagaccagacctggctagttgcctcttctccaaaattcatcaaacaattgacagttttccaacatttttttctgcctttaccatcctttctaaataaaggccaaatataggcaaagaagataatatagaacagaggttattcacttggggcccataggcccccatggggtctgcgaatagaattcagagaggtctatcaacttcaatggggaggaaaattacgtctttattctcactcacctctaattgaaatgtagcatatcctttatttatgaatatagataaccaagcacagaagtgtcagaagtgcctgtgactttatcagtgagaaaaatcacagctatttttatatcctattatacacagtgccaatatcttgaaatatccttttcactcaacatttcttccaatttgtgttagttgttagactcactgctagatttgaatttaatgcattaatcatgaagcacatgctataccacaattttttaaatattttgatagctgcattttaatacaattaattttctttgtaatcctatctacatgtcaaaaggtctagagctcaaaaatctgaagaaccccaggtctagagaggcaagggctgccatactaagaggctctgctgggtggtgcagtgtggacgaacagcttcccctaggttcctcccaaacaggtttccctgccttgcccctcacagtgcctaaaagtctaccaagaaaagggttcacttttactacgatatttcttccctgcacataattaacagcacacaggaaattaatttgtaacttaaaaagaaaagaagaatataattggcaataaaatatttactaatccaagcactcagctaagcactttacttaaaatctcatttaatcttcaaaaatctatatgtgggtactatgattttccccaatttatagaagagaagactgagattcagaaaggttgagtgtcttgcccagtaacacccaactagatcttttctgaactaaagtcaatgacacactgagagttatttttatgtaacgcctgttcacatgaaagaacgcgatgtgagggaagaataggaaaaagttatatggccagtgaaggagttcaggacacgccacctctttggcacattgattattttaagctaaaagcatttgaaaaacagcaggctcaagaagagcattctgaccttcccttttcttcctggaagcaggagctgtaactcccaggtgaaaggtgccctctctagagcaggggaaataaacattcttaccaccagagacgggcagtcgaggcgagaaatctgtacaaacagaccttgttaaaataattcttatctgccttattttagttacatttttgcagttgcctttctttgctcaacctagtatataagcacttagacctagctaggcccacatttttaaaaatgggggctcccacatatatgcaaaaaaactactgaaaaaattttgtatgcttttctccgtttgatctcatttatgtcagtaccagctggaaaacctaagagggcagaggaagaattttacctccgctataccagcggttttcaaagtgtgacctgcagaccccatggggtccctgagatttttcagaaggtaactgttctcagaataatcctaagacattatttccctttttcattgtgttaatatgagtaacagaagtgccaaggcaatagtgggtggaacttctggcaactgagcatgagtcaaagcagtggcaccaaactgtatctgtcggcaccgcgtgcttccccaccacgcctgcgcacaaaggagaaaaaaaaaagagagagagaagaaaagaaaaggaaagaagacaatgcctgtttgcctgtttcacttaagaatgtccttcaatgaaacagagagagtaattttagtatatcttgactcctgagtacacattttaaaatattccatacaaccaaagagaaagcatacatctagcacttaggtataccacagtatggtgggtgtctacaggtaggcttggcaaggcctgccgcctgtgtttttctatggcaaatttgaactgagatcttttattgaaaaaattttaaaaggttgttaaaaaaaaaaaaaaagaagaagatttgacagacaccttatgtagcccgcaaagcctaaaatattttctttctggtccttacagaaaaagtttgccggcaggaaaaaagcaattgtgtcatcatttgaattgtgagcagaaatatctgcatttttcatgaaacactgcttttccttgaatgatcttgaatgaaattatagttattcagaattggtatcttgcagacattttttcaagaagcatcatttcaaggaaaacaattgatagtatttattgccagttataaaatttgagctttcatggagaaaataagaattttggaaaacttgaattcatcaccatgacttgacggctttctaatatttaaagaattttcagatgagattggtggtgttattaataagttttatttttatattatataatgaaatgtgtcaatatttggaggatctgcataactctgtaaatcaatattttccaagtgatttttactgtgtgattttacaaaattgagcatggtaaaaatatgaattcaaaatacaagatagaccagcagataaaacagacatgccataaaagtcaccctttttagggatatagttcaatgtgtgttagtataaatagagttgtgcaactattacggcaatcttattttcaaagattactatcaccccacaaaaaaatctcttgcctatttataatgattccccatcccacagccttaagcctctagtatactttctgttttcatagatttgccttttctggacttttcatgtacatagaattgtaaagtatatgttcatggctggtttctttcacttattttcaaggtccatccatgttctaacatgtacaagtattcattcctttctattgcctgtatgagatataaaaacacaaacaaaactatttttctttctttcacattcaagacttaatacttcatcaccaaaatgtgcagggagttttccccactcaccaagcaattctccagtaggcagttaaattgtgttaattgtgttcaatggtgtcctaccatttaactcaattctgacgttatctattatatttgaagctagcctcagatcacacagggtaagggcttaatcccacaagactgccctaacatcagatgccaatatcaagccccaggctgtttggtctgacaaacaactataaatagggaattaccacaatccccttggggcagatttgctagggcggctcacagaacccaaggcaccactttacttactattaccgatttaatacagggatttttttaaaggatacaaataggcagatgaaaagatgcacagggagaggttcaggaggatcccaagtgccagagcttctggccccatggagttggggtgcaccatcctcctggcatttggatgtgttcttgttcatcaatctggaagctcttagaactcagtccttctgggttttatggagctttcattgctttagcataattgattaaatcattgaccattggtgatcaaatcaatgtttaggtcctctcccctccctccaggttggaggttgggagtgaaagttccaaggctctaatcacaaagtgggttcccctggcaagcagcccctatcctgaggctaagcaggagcccccagccatcagtcatctcattagcatgcaaaaggactcttagcactgaagagattccaaaggttttaggagctgtatgggaggaaacaaggataaaaactaaatatatatttctcataaatcacaatctcacattgccaaatagtattccataatgcggatatgccgcattttgattatgctttcactagttgatagacatcagggttgcttccacttgggagctattatgagtaactgagtaatgccactatgaacaattgcatgtaagtctttgtgggacatgttgaaactgcctttgcaaagattatgacagagagaagtctagcataacagactccatctttcttctagcctcacaggccctctgtcctcactcattcctaggtgtaggccaagctaagcatggaagggatttagtttatagttaaactttgaaactccctaaaactattcccctccttgcccagggaccaaagccgcttttgtaaagctaataaaaggctatgagattaggattatgggaggggcctgaattctgctaaaatggaggcataatttgtataattccttacagctcaggagtcatatggtcaaagatctgttcctatggataacatcactattatagaacctaagattggtcttgtgatgtttttcagattactgcattctggtaactgactgactacacccagtgttttcactcatgacccagaggtggactcaatgcgcaagggccattttccatactcctgtgatttcatccccaaccaatcagcaaacccattccctagccccctgctcaccaaattatccataaaagccttagtctctgcattcttggagaggctgatttgagtaataataaattcctcttctccacttggctcaccgtgcattaattaaactcttcatttactgcaatattgttgtctcagcaaattgggtttatctgtgcagcaggcatgaagaccactctgggtgattacaatatgatttcatttctcccgggttaatatataggagcgggattgctgggccacatggtaactccatgtttaacattttagccatgtgagtgagctactgtggaagctattcctccagccctggtcaggcagccttcagatgtctgcagactcagctcacatcctagttgcaacctcatcagagtgcctgaggcagaaccaccaacctaatccatccaggattcctgagcctcagaaattgtgaaataaatatttgctttatgctgttgtgtttagggtaatgtgttatacagcaaaagataactaatgcagttttctcagatttctcctcagcctcgacacctgtgctgacaagatcagcttcaagacccttaattgcatttttaagaagccatactttcttccctttggtgaccagttggtgtgatgtctaatggaagataatgttacagttcagctacatatgatttcactgtagattccatttcaaaaatcggtctttgcttctctaaggaggagtgctttgactataagacactcgaatgccaatacaatagacctaacagttaatctctttgagctaatagtcatgtcctaggcataaaaatttgctttataaataatgttattaggttagtagattagaagaaaactagttctcagtttcagcaagtatcacaaaaattaatcaataaatcgattgaagcataatcaataatatgaagaaatgggaactgatttaacctgggaaagtggcatgatggctatcaaataataccttggtaggatatggcgtaaatgtaaacaaaaagttgagaaacagtcacactgttttccaaagtgattgtgttagggtaagtagtcagacaggcatgaggaggacaggagaggccccccgctccaggaatgtcaggtgtctatcaggtgatggtcatgcagttgttaaactgtctctctaaaataagaattggtcacagccagcaccagggaaagacagtctcccaattgatagaaaacagctgaagctggtgatcagtagcttcccgataagctctcaggaggtggacaagccgactcaagcatgcacactatgaggcaaaatggcagagtttaactggtatatgaccttcctctaggaatactcaactggctagggaaaaatacctccagtgagcatgcatggaacaccagtaagcacactgtgcatgtggcccctccgaagtgctggcatgccactgtgcctgcagacacccaccccaagggaaggatcaggagagacacaaatccggaagcatgccaacatagaaaagcccaagtcaaaggccgcacagcacacttggatctcacaaatcacacacttcatcctctttgaagtgcactttacttcctttgaccctgctctaaaactttttaaataaaatttcactcttgttctaaaacttgcctcaatctctcactctgccttatgccccttggatgaattttttttctctggggaggcaagaattgaattgctgcagacccatacggatttaccaatgttaacaattgtaccatttttacattcacaccagcaatgaatgagggttccaatttccccatatccttctcaactcctgttattgtccaaagtattgtagctcttctatggttgtgaagaagtatttcatagcgagtttaatttgagttttcctaatgactaatgatgttgaatattcttcatgtgattaatggccatttgtatatcttccatgaagaaatgtgtgttgaaattctttgtacaatttttaaactttttattttgaagtatttacagattcacagtaagttgcaaagatagtaaagaaaaaactagtacattttaatgtaacagaggaagaaaatttaattgatatggtttctgattatacattgcaactactttttaagaaagtatcacttgttgagttttggtatactatcaaagaacaatatccacaactatcacacaatctatgaaaatcctccctttttctactacaatctgtgtgaagccagatattctttacatacttaaaaatatatatatactgtaactgattaaatgtaaaaccagatataaggctgtagctgcgttctaagaaacatgcaaagctataaagcaatgtcattcttctcattaatgttttgtaaaacaatatagctatttttcataaaaattacttatgctaacatgtaatgaaatttgtgttgctatttttcaaagaattaaaaagcattgattttttgtcagttttagtttgtcatgtggaagtattgctgcatatccctcatgaacaaaagctctttggaatcctcaacaattttaagcatgtaaaaaggccccgagaccacagagtgtgagaattgctgctctaagtgttaccctggggagacaggtgtgggtgagcactgaaccccgaggcaatgaggacagtgtggcgtccttaggaagccggtgggttatgtgaacacagagagagggaggggaggactctgaagacagaagtcggcggtttctcactggcacatacatgcacacatgtaaactccactcattgagaaaaactaggaaggaagagaatatctgacagcctaattttctaactgtataaatgcagtactgtacacatgaaaactcaaatccgtagcctgtctgcacagctctcaggctctggggttgtcaccaaaacactacagtgacaccctgctctgcttcctctgatggctgcacccgactcagtcaggctcccaggttccctcctctttgaccgggcctgccagggtgcctccttcctctttgaaatgcctccacagttcctcccatctgcctgcaggaggcatgcacctcctcggcttccccctcccttgctctgcctgcaagaagcacagatgcctttgacaatgatacttacattgctgaactctgctgggaactagctaagggcaatgggagtgacccgtgtggagaggttatgagcctccaggacttgtgaggctccacccaacccaagagggatttcccagaggcccctttcttcccggggggtgaggagaactttggctcaggtatcagaaatcccatccaagtcctgactctggtagcagcattagtctttctgagtgtcattttctcatccacaacatgggtgatgaattctccttatattaatcaaagaaatacatatgcaagtgtttttaaatataaaactctatcagtgtaagccacgttattatgaataaatctaaaagtacgttcgcaaacctaattcaatgggtccttgtgattatttcataaactaacataaaggtagccgactatgaggtaacgcagcagaaatgcaaaagatctaagtagcattgtttatacgtgtgtgtgtgtatacttggaaatcagaagagtattccacattctcttcatttctttgagccaagggtacttgattgattagtttaaatattaaatatgctcgtttgttttctctcagttggacttctctctgaaatatatttcctttcttcatttcatttcagaatttgcttggaaccacagtttaaaaaaatgtgaaataaggcagctggactttttgtgatttaaaatcatagtgatgatgatgatgataaatgaaagcacatatcactttgggggaagagcagactgaaggaaggagtggacggtgcagccatgaagaagcatgcataccttgtatgctacactgagtttctccatatgcctctacaaagtatcaggttttcagaggtgcgagttctcaaggaaagactttaggtcaccatgccttaaatgtgggtggctatgttggaaaaaaacatttaacttatttcaattgcctggactgtacagaggaagagaatcaattctaagttaactgagtcccaaacaacatacagctgtgtagattaggttttatatcgtgaaatgcattcttcagtaatgaggaaactcgtgtggacttcagaaatgagaaaagtcttctcagtccaagaaagctttaggagcagcatctgcgtcctgcagaaaagatagactggagctagcacaagtcagagtttgattattacagcagcttcctactttgccagacggagctttcttgaaagcacacatgaaattctaacgttaaaggttagcaaaggctagtgttttgtaagagacaaatgagagtacacaatgaaaatattatcttcctaattacactttatatttcagggacagttttcaacaaaatacttcccgtatttcacatgttcttaattttgtaaacacgcctattcatttccatcattttctcaacggtactatgggctcagctacatatatatatgagacctcagcttcctagccctaatactaaccctttcattttctgctttcaattcattaaaaaaggggaaaatgcaacaaagcattcaaataattgcatgcacaatattaccatacaaatacctgcacaaggctgacacactaggccattagctgacaggcagcacttcataagatctctggaaaggttaatacatcaactgtggtaggaaagactgaatttcgtgtatgcaaagcagcttatgagagtcaggtgtaattatgtaagtaaatatttctaaaaagctgaatgtatggaagttaaagatgctttactgagattgtctgttgatgcctttctattgcagggaacttaataacttgcagacagccacacacttctcatgttcctgaacctgatgcagaacaaaggcctggagggccagttttcatctcaaaacttgagttatactatgtgcccactgattcatatcccgcttgccttattcagtaactgatttttaaatggaacaacgtttgacatgactttttaagaagggtgttcttaagtcattatagagagggaaaatatgataaccttattaaattacctgcctttgtagactgggtaatgtcgcaggcctgtcccccgaaggcctgtattgagacaagatgcatagtgaaagccacggcaatccattacgtcctgcttcaaggtgagtgtggcaagaggaaaactttccctccaaagcctctagaggaaaactaactcaaactggagggactgaggcagcaggaaacgcaaaaggtaggggtacttttagtttcccaggattcattttaccaaaaaagctgtttgaacgcttggggacaccagaaaagctagattcacgtaactgtacttactgtttaactaccaccaccccacataaaacattccataatcatgacctcaatcagctccgaaatgtgacacataaaacgttatgacataatagaaggcattcagtaaatacttgtttactcctttgaggtagtaggcaaaattttgtttctctttttgtaacaaaaaagatttaagtgcgaagagatttggagaaactgcaactaaaatgctatacaaactaatatattgtacaaggccacgatttgccagggacttttgcagatattttaattcactgtatctcatttaatcccaccaactgtctcccaaagtagatattttcatttgcgttttcacagatgaaggaatcaaaactcaaaatgttaaataactcgtgttctttatttaagttaaatgtagcagtttctaaacaccaggctctcgggatgttttataacaaagcccttacttgaggaaatggggtataatataaagacaactttctttagaagggctaggcgcttgttttcaaagctgggcttcttcatttattagctaagggacaccaggttagttatttctgaatttcagtttcctcgactgaaaaacaggaaaataactcctatgtgttaaggttatattgactattcaaaataattatgtattcaaaaatgtctacatatgtatatgcttataaatacaaatatacatatgtacttgcatccaaatagatgtttgcctgtatgtgtctcactttgtctggcacagtgtatgagatccactatttaaaactgcttttttggctgggcgcggtggctcacgcctgtaatcccagcagtttgggaggccgaagtgggtgaatcacgaggtcaggagattgagaccatcctggctaacacggtgaaaccctgtctctacaaaaatacaaaaaattagccaggcgtggtggcgtgcacctgtaatcccagcaactcaggaggctgaggcaggggaatcgcttgaacccgggaggcggagcttgcagtgagctgagatcgcaccattgcactccagcctgggcaacagagtgagactccatctcaaataaaaaaaaaaaaaaaaaacaaaaactgtttttttaattttactctctccttaagctagttaactgagtatgaaaataagtttactcctactggatgctggtacttgtttagtctttttgttttcctttaaatcatttcttcgagttacattgtattaatctgaatattctcttaacttgaattagcaaacatcttcaatttgcatgtttaccagcctttaaatttagaatgatgttctgcacaacaaaagcaatggtagcaaggaagctagaatgacacagtttttaaatggcttttaagaggacattttaatttcagaagaaaaaaataccatgtattttagacatattttcccatgtgttaattattacttttaataattagtattttttcaaagaacccaacaattttgaccacttctccatgttagctgttggcttacatctgcactgcagatgggaaccaagtttcgggtaggctgggtgcatcatctgtttccaatttgacttcgttttgaaatattccaatgtacagtatctggatttcctaccaatgaaagtggtacggcaatccttaaagattcacacaggttagagctggacaggctcataaacatcatcgtatctagctctgtcatctatacgaaaaaaaaaaaaaaaactctgagagtacaagaggtgcacatggcatctcataggtcaaactgctagttgggataaattcaggatgaagcaagattccagctcagggtgctttccattgcttgtggcccagcatcctagctaggacacaggcagctgagaaagatggtgggctggggagatatttcggacgtggcactactgtcacttcaaagcatgctaataagattttaatggggcctgtctcctggtctgcgctagccttcccttgcctcatcactgtgagttacagaaaaaagcccctggcagctaaactcttctctaaagcttttctctttggcttaaaatatttcaaatccttacacacaagtgagacctaaagtttccaggctattctttcataaaagaagattataactcaaaaagctaaccctttatgcagaaccttatctggcatggttacactgagatatttctttgaggttaagaaaatatttgctttaaggaaactactccttctaccactgttaaggtgactctctgcatacactgtatgcctgtctattgttagactgggtgtgggcagcctcagtatctgccccactgagcagtcaccatgtatcagacccttcctgcctgtagctacatggcatggggcgtgatcagacccttcctgcctgtagctacattgcatggggcgtggctcggccgaggatgtgtttgcagcagaaaatcctgagcccaacaagctcactctggcatccaggctggccttttgcagtgaccacaagtatagttgcatgaattaatatacatgggagcttttgacgtaggaggacatgaccaaataaacatattcagctgaaaagagagctaggcagtgaggacgtgtgtgaatatgacacaacgggtatactgacttctttcttagtgaagtgattttgagttgctgggtctcagcaaacaatactcccaaatgaaggcctcagaagcagcctaagaagcaaaagtttctcgctggctttctggagccctcctgtctctcagtcttaacctcccctgaggctggcggcagaatccagaatccctcttcctcaaggcaggtcactgaagtcagaacacgttttctccaaagtcggccatccaacctaaaactatgactctaactttccttccacctttctgggttaaaactggccatagagaaatcatccaatttgccttgtttgactgaaggccataagacgcccacacccagaagggagggacgctgctcctagaggccgggaggaatctacacgggcctggctgggttccccactcagtctgttagcattagatcatgacctttgcgtccaatcctatttctacatggttgtgtataatttgctgaacctaagcaggaaaatggacaattttccctgttatcactgattttttttattctatttattttatttatttgtttatttttttgagatagggtttcatgctgtcgcccaggctggagtgcaatggtgagatctcagctgactgcaaccgccgcctcctgggttcaagtgattctcctgcctcagcttcccgagtagctgggattgcaggcatgcgccaccaagcctggctaatttttatatttttagtagagacggggtttcaccatgttggccaggctggtcttgaactcctgacctcgggtgatccaccctcctcggcctctcatagtgctgggattgcaggcatgagccaccgcacccagcctgattttttattttgaaggttcccatgtacacgttaataagttttgtgtacctgttctccaattaatctgccttttgtgaattgatttttcagcaaaccttcagaaggtgaagggaaaaaccctacagagtccaaagatatgtttaaggctcaaatctgtcactcactcaccacgtaacttcagttaaatcacttaacatccctgagcctcagtttcctcatttataaaataaaagtagaactatctatgtctccacctcacagggttcaatcaatgctttggattatgcaaagaaaagtactttaactgcaaagcagtatgtaaaaatcaggtctaaaatttctctgccattggtcatctataaattgtaggatctaatagaattgcaagtaggaattcaataaatttgaatgaaatcatgaccatgaagcaggataggggaatgcacttcagattaaaagaaagaagaaagacacataaaatcttgaatcacaaagtaaggatctcacttgaaagtggttctctacccaaaaacatctatctatttttttctatctggggttctatgatattctttgtaagaatggttccataacagcaacaacaacatactggactttaatgggcgattactcagcatctaccctgggccaggcactatgctgagagccggaaatgccctatgagtgaagggctcatctcctgaagccatgctggtgggagagcggacagcgagcccctggctgccacagagggcgatagagccggcacttgggcattagctccgcaagtcaggccgctttgctgcatgagtcagcattttagcttttgatttaccgatgcaggcaggtcattcttttttcctttttaaaaaatattatgaaattttgaaaatgagatttttcgaggggataagtagaggaatgaatagattcacacacacatacgcgcgcacgcaaacacacacatacatacatcttacaaactgaatttaataacaagaaaataacacttgtaaatatcaaatatggtttgttcatcattctttcataagcctttttcaattcaaaaggagtatatttttgaaaactgtacaaagaagaaagtgtatttttcgatttttgcttaggaggcatttttgcaaacactgtaaaaactccatgaaaaatgtttactacaactgaacaaataggagaaatgaaatcatacgctcagcccaacagaggaaacacggctcctggccagctaccatcacttctaggcctcagcattagcatttaaacagcatcatgttttcatggtatttctgaagctgcctgaatccagcttactgtttagaaagtagtggctcaacattgttaaatgcatgtaaggccagtgtagacgctattatcagtcctctgtagacttggacctagcactaaacagactgggggagtcgccaagaccaaggccaaatcgagagcaatgatctgagaacatggcctgctgtcatgacgatgcagctcccagcctatatatgagtgattatagctctgtagccaatttcagtggttttattattattagaaaaaactcatagataatgtagaaggaaatggcaggtcatctggcccctgagagtactttatccagttgagcagtaaatgtttctaccacttcctgagagaggcaattccacgatctaataatggctattgccaggaatctgtttattcctggtggtcagctgacactttgtcatatttcacttcatctgtgactcttagaaatttcatctccttggagcactctttagttcagtcctagccatccttctctcttctcctcaggaaaaaaaaaaaagtagcttaaaaatgattgcacataaaaagcaaggatccactttaatgcgatctcaaattataggtagcacttccacatacttgcacatagaattgcttttgatgtttacattatgtggccaacaaaagaacataaattgtttcattcctgaggaaactgaggcagaaaaaaagtcaagccatttgttcaggtaaattctttgtgaagctagggattctgccacaccaaggggatgctataaagcgcatcatgaaatcatcaaatgctacttgtgatcctattaagctgtggatacaccttggctatgtcatccaagtaggcccttcttagcactgcaggtgtctcttttgaagcactgtaccaagaaaacaatcccaattggtcatctggaagtcttgttagttttttgtcgatttttgactttttcatctcaaattgtaccaagagaagggaatcatcataatcgacaaggaacaatcgtggattttgaaatttgtgtttgtgttttggatgcattatacatttttcactgtggatgttcctttgcagttaggtttagtttttactaacattgttaataatgacgaatatttgcataacattttcgaatatacagacaattttcaaatattatcttacaagatatcatttccatattgtgaggtccatggagatcaagtagatttcaatacccttgattcaaagatgagtaaaacaaaattcaggaaacttaagcaactttcttcaggtcacacagctctgaatttgcatctctgtactttgacttcaagtcccttgatcttccttctgtataatgttattgctcatttgtattcactgatcaacttctaaatgtgtgagtagtcacagaaagctaggtgccaagagaaacaagcccaggcttagacagttccttaacacaatgcatgacacatccttttcacttagacttgctgaggccctttgtgatttgaaagctctgttataacaggtaataatttgagctcacttagagaaaaatctcaaaaagttagagatgaggaaagtgatctctcagagtcttccagccacataattcagtaataatctgaatgttcttgcacactctgccatgttgcagttttattttgcatctgacgtcttgatgggaatggaaaaggactgttggtgagaagagtggcgctgggagaactcaattcattaaaatgacaagatgtttcctctgtcacggactcagcatctcaggcactaaaatgcaatagcccaaaagtgccgagaacaaaggaaatccgactggtgactgcagattacctagcatgggaatctcaccaagataaatagaagttactttcattgaggatgaaataaaatgtttgttttgttttggggctgtgaaagatgatataaagttaagccctctgccagcagagcttcaggaaaagtagactgtcagacacattgaattgatttctttatggaagtagctgaaaatagagcacaccagtgaatctgctgcaattttctaacattctagactgggctttcaagaagcggggatgagagacccaaagagctgaagggttattcgtttctgggttaggaatggaaacccagtgagtggaactacttcttgcccttaactttccattccttggatctctctgcccactgccctaagtgtaatggttcttgtaacacctaacctatgtttgaggatacttgatttaatcgtgttagcaaggcatttggaggtttccaaatgaaaggcagtggaaaagtaccaaacagtgttatgatccatgttaatgagcaggttgttggcaggcaaagtgaagaaggtcatagaaaatgtcactcagtctgcatgcagagaagtgacaaagaagttctctcggggctccgtgttcaagccaatcttatttgttaataatagatgcagtaatgctttgatattgttttgtgaaaggtactctgagagcgtaaagtgctttgctagcactaatgtattaagcctgctacttctgtggaaagcggggaggggttaagtgttattttctcagtttcacaaatgaagaaactgaggcaccaagagctgcctttcccaatttctcataactgggcaacaaggtcaaaaatagaaatgatgagaggaatggaatttttagcccataaaatcatgtttggtttctaatatttttccattgaggctgtgatttttttttttttttttttttttttttacaaaggggatatattatatatgtttggggtaaggaggtgcatgaaattcagcaaaaagaaaatgttgtgaattatcaggtgattgaaccctgaacagtgtcagccctgtaggcgccacgttgtttttagacaagtcacttaacattcctttatgtcaatgggcactttctaaataattgaaaaaaactttgtttcctccctttgttgtgtcccaaataggaatcaaagggttgtcctagtgaagtgtgaagtccaatctaagctgttcttctggcccgtggggaagaacacagttgcaccaaatttctttagggaagacactctaaagggccattgtttctctcagcctctagcactgtgggcttaaaaacccagaaatgagaacagaggggctgggactgctcccttgacacatccaggccaggatgatgggccagaggatgctgccgttactaataggtttctgctacctggagtggatttaggctgccttctctgagaattgtttgactttgagggcaggaagtgcatgtgtccatgcacaagtgtgtgtgcttgtgtatgcatacgtgagtgcctgatctcaaatttaccctcaggacaggtggaaaggcttgggtgctgcccagaggatgcgcccctggagaagctgtggggaacgtggcctgttctgaggaatggcatagaagtctgtgagccagagaggcattctccgaatgtggggtatggcggtaactccatgagcagttggagcaaaagcaccactgggggagaaagagccagggctgagaatagaagccaagagtggaaactggagcctcaggggccactcccaccccatggggctagcatgaagaatcgaaggagtttatcagactggattcctccttccagaacatacctgctctagtgtgaaggaagacccaggcctggcacagagctgccagagaagcaaacaccgaatgcccatccaggtgacagcccaagggcaaagagagttgacaccccgcctcctccttcccaccaaagtacataaggaagatgcggagggctggtgggaacacatagcttatataacagagcaaagtgagagcagtatcctgtcatctttaacattacaagggtaaatatcgaacacctacatgcatctgaataaaaatacttacaacctgggaggaatgacccacaaatggttaaaaaaaaatgaggatgatgaaataatgaaccttttttccttaaacacaatttgataatttgaacttagtaagatgagctcctcaagaagaaatacaaaaaatcccacagcatcatctgtacaatctcctgccttatatcattaatgatcttattatgtggactgtcattttctcagctaaattctgaaaggacaaaactgttttagctaattgtgcacatctctggaagtgtcccaagcacactctacataaagtgggcctcagtgcatatgggcaacttgactgcctcaagattcagaaaaatattaggctgtactggcaggtctgagcacagatgcacctctcctgagcacagatgcacctctcatgcttcttatgttcatttacaaagtgtgacaaaaaataatgatccatgtttgagaaaaacagtcaaacatcatctatttaaatgagtgtagaaatcataattattactgaattgggataaataacatcatgtaacgccccttccctcctataagctccacacctacctactacacactagatttctttaaccacgtgacctcatttccgcaactacataacatagatattactaattccagtttaagcataagaaagctgacattgggagaatttaagtaacttgctcaggaatgggggactaatgagttcagacagtcagcttgattctaggctcaagcacgttctttccaataaatatgagattactgcctccatcctgccacttttctcgagggcaataaaattaagccaataaagactaaattatttactcacatgtcagaagggctattacaaaaagatgaaggataacacatgttggccagtgtgtgaagagagaacgcttgcacatggttggtggggatgtcaattagtacggccattatggaaaacaggatgacagttcttcaaaaaattaaaaatattctaagaagtaggctctggtcaaattaaaaaaaataaaaatggcgccaccctatgatccagcaatcccatttctgggtatatgtccaaagaaaatgaaatcagactgtcgaagagatgtctgccctctcatgttcatcgcagcactgttgacaatagccgagataatatggaaagaacgtaagtgtccctcaacagacgaatgggtgaggaaaatgttgtagataaattcgatgaaataccatttggccttaaaataaggaaatcctgtcatttggagcaacatcaatgaacctagagtacattacattaagtgaaataagccaggcatagaaagaaaagtgttgtcacttatatctggaatctaaaaaagctgaacacacaaaagtagggagtaaaatggtggttgccagtggttactaggggtaaggaggtgtggcttatgaacatgttgttcaaaggacagaaaattttagttgaacagaaagaacatattcaagagattcattatacaacacagtgactatagttaataacaatgtttcctgttcctgaaaattcctaaaagagtagattttaagtgttctcattacaaaaaaatgataactacatgaggtaatgatatgtcaattaactcaatttagccattccacaatgtatatgtatatattccaaaacaacatgttgtacaagataaatatgtacatgttcactcgttaattaaaattttttaacttaatttaaaaaaaaaaaaaagacagtcagccctccctatctgtgggttccacatccatgaattcaatcaactgcacatcaatgccttgatttgattcttacacattgtatgcttatatcaaaatatcacatgtaccccataaatatgtacaaatactattatcatcagaaaagtttttaaataaaaatcgtatctgtactgacaggtacagacttttgtcattattccctaagcaatgcaatatcatgactgtttacataatgtttacattgtattaggtattgtaagtaatctgaagatgattttataagagagacttgagcattcctggatttgggtataggtggaaggtcctggaaccaatccccatggatgcggcatagcactaaatagatgtagttattggttatgtccactgcttagcttcggtctccctccatgggatgaagcgccaccgatgttaggcacttcctctgttcatctgcaacagtgcctggctcagactacgcactcaaatagccatgttttggacaaaggcactctgctgctgtttctagaactgtcttcagctttgcagaatattccagaagagtaatcattctcctgactccatggagatctcatcaatgtatgtatgcctttgttttgtttttctatttattcttaaatgaaatctgccttacctggggtcactatcaactccctttaccgaacctgcctctctggctgacttttcctggtttttgaattcagtcttattcatactaaaattttatcccatctttctagaacttcctgtcccctttcaacactttacttttcctgcctagcactgtttcctttctaacatattatgttgttttaaactatttattggtatcttcaaggtgagagatttgatcagtgtgtttgccttttatcaatgacttactagaacattgcctgggacatagtttgtgctcaaagattatttgtcaagaagaagagcaaaaggaaaaattctttttctaaagatattcagaagaatataacctgcatataactctacaagtatttaaggctttgtttttttctaaatattctttcttttccattaaatctgcctcctgaacgtgactattttccaagcaaccagatgctatgggctgttgcagatctggcgtgctgccaaacgaatcgcggatcgaaaaggcttccaggtacataatcactcgtgacaccctccccacctggtgagtgtgcaggcgacaacagggcacattttcacccacctccacaagtgagcaactccaggcctggcccagtctgcatatctggtgactggcaggacaaagatttccagtgcctacggaacccatgaggcagccaccgtgctcactcccagtttatagaaaggactctgaggcccagaaaccattaaacaactcgcctaagtcctcctttggtcagatgtaaaagatatgagactcatggtgtgtctgactctagaaaattatcttaattgcttttcttcggtgttaaactcctatctgtaagaatgtgagcgggtgaataaaagagtgtatgaagagggctccccattcctgattttgctaccatcctccatgccttgatttcttttcctgtcatgccaccttgctccctggctattagctgagtatcattagttacaatgtaaaatgaatacttctctgtttcaagaaggccttctttctttctttttttttttctgggaaatgctgtggctggcagtgcagaggcaattaatatacacacatctatcctgcaaggaaatgcaagccctgctggccatcctcaaaaccatgcccagcatgaaaggtcccctctgtcatcctctgcctcactgccctgtggaagctgaggctacctttcaggctggggttcttgtcctgtcaagaaagaggcttaatgtttcttccaggagtggttaaaagtcaaccaatagatctcctcagtcattttccaagctgggctgaacttagatttcataacaattctatttttaactactttgtaattctattatcttctcctttggttcaatgtttctgtacattaagcatcctagcagatttaaataatagtctgtgataagtctagaaccaagttaggtgatacgctttccttcaggtaaaccatttcagttatttcacaaggccaagagccccccaggtgtaggcatgccccccagagcctcctgccccttactgcgccctttccctgagagaaggcagaatgggtacaagtccacccttgttatttgggataagaataatgcctacataggacagaggcacccaatgggtgctagagaggtatggtattgggaatgggaaaagataaggtagcagggcttaggccaaaggggagaggaaagacaacagaagaggagtaaagaggaataaagctaatatgaagaaagtcatgacaagttgtataaagagacatcaaaaattaacctagcagctgggctgagcagttgggcacaaaaaaaaaaaaaaaaggaggaaaggtaatatttatgtttttaaaggtgaaagataacaaaaaagtaaagagaagaatagtagctaaaacaaactaaatcaaataaaaaaaattagaaagtaaaggagcaaatgaaagaggaattaaaatgtagtcaaatcattagtaagttagtgttgtatatcggcttaaaaatataaaatattgctctgatatagcaaatttacctctcttccgcagccctgtggtgttctaaaaatcagtagctgaagaaataaatcgttaccctgtcacactggatcaggtgcctgccataacaccagctcagggttaagtttcctgttattccccattacgaaggttctgaccattcagggtttgggttccgcctcctgagtctctgtctatgtttaatgactgccatcaattatatacttcttttctccccatgacattttgtcaatcataattggggcaggtatttttgctattattattatcatctttattattttcagtgataaactatcagagcctggctcagttgatagaaaatctatctgaatcttggctgtcaggatagcattgctgattactttgaagtaacctgcagcagtgttgagagaaaataatcattgaaatgatccaaaggagtaactagggaacaatcttttatctttccctccctccctccctccctccctcccttccttccttcttccttccttctttccttcccttccttccttctttccttcctattttaaaaattttcctgaaggataaactgtcttcttggaaatgatgcacctcaacctcaagctacaagggaatactctgagaataactggaattgttcttaggaactagtctctccctgctgttgcccctgggtctttagaggaaacatagttgttaccactaatcagaatagacaggtaaaaccaccagtagataagcttcagttagccaagatgggactgcaagaaaccttatgaacgaaaccttaaggtggcttagcggactgcacggacggtctgtgtttaggtgaggagcctggcatttcagagctctggagaataggagcaggcaagaaatccaagactgctcactcagacagtgagtcaacgtgtaaacaaaggctgagaaatgtgggcttagctcttaccacaactaaaaaggcctttattcatccatatgtttctaacctcagctcctcaccacccatcagaaatgatttaagataaataccagcccaagtaaatatttaaaacatagtctcagatcctaacgaagttttaagattttctaaaaatataatctacgcaagtttttaagcataccaactattttacttgaatatatccaaagaaaaggggatatgcactttgaaatctatgaaacttaaccattttttaaaaaatgaataataatttgcttcatgtaaagtagaaattacaatgaactcatgctacattatgaagctacttactgttgaatccatctttcccttttctagactgaaaagtaaaataaccttgcacttaaaccctgtctctatcaccttggacgagtcacttctgagccatagttttctcttctgcaaaatgggaataatatcaaaattataaattgttatataaatgactgatttatacaacattataggtgctcaaaatatggtagctttcattcatttacccgttcatccatgtatccatccatctgccaatgtatttacccatctaatttttttttttttttttgagacggtgtttctctcttgttgcccaggctggaatgcaatggcatgatcttggctcaccgcaacctctacctcccggattcaagcaattctcctgcctcagcctcccgagtagctgtgagtacaggcatgcaccaccacgcctggctaattttgtatttctagtagagacagggtttctccacgttggtcaggctggtctcgaactcacgacctcaggggcccacccgcctcggcctcccaaagtgctgggattataggtgtgagtcaccatgcccagcctacccatctaatatttattgaaggtctcctttccagcagaggccgtgctgggtggtgccttttatcaagatgagagcctgggttcctctggttgttttgctggaaaggttaagttagactttcaagcatcaacaaccatatcgacatacaaactgcattattgcaacccagatgttaaaaaataattgtcagagtttgcacttaagaaggcagatgggatctattttaacaaatgaaacttggagaatgatggacaatttgaagtactttgcataatattctgtcaatttaaaaagaaatgcaaaccacaagttttgcaggtcctgggagggcattgccctcaggatgctcactcctgtcccagtccaaactaactccaattcaaggaaggaaaaaattcatactggtttcatagaagtcgggaatcgatagttcttgacaatcacttcttccctataaaccttaagcccaggaggtcctcaagagaagactcagtgctcacagaaggaggggcaatttgagggcagacatattgtctttccatgcacaacctctgaagtatcctagcaactcctgagagcaaaccctttatgatctgagttcagggccatccagttctgtctccttaacgctgtcagtcagagctacccaggaaacatcattactcagaatttcaccttgcaaataaatagctctgaatggccaccagaggcaatggaatctctcaaagacattatctggaaatagtcagtggacagcacctcgagtcccattaatcatcctcatgcttacagtacttcttaatggcttttatggtttatcctttgaacgccaacaaggagtgtgatttttcctggcttattctattaagcagaaatctatatctaatataaatgtcccaatggtagggtatttggcaaggccccggatgagctatcaccccagttttatcttgccctgcccaaaacgatgtgcggagattgaagatttaaggaaaaggtaaacatgcctggtgctttctaaggaatcagaacacaatgccatcagggaaggagttgccgtataccaccagctggatcttcaggggtaaaggatgtggtttttgcttttcaagacaggtaaggctcaggaggggcatgaaaccacagactgttaaaggaagcaaaacaaaaagatgcttaattttctccagggagtaattttaaataaggaaacgtgattggcaatggctgtccttgtggggaaagaaagcctgggctttgcctcagaattctctatcacacgcaagggaagctggttaagctgcccaatcacttcccagtgtgccaagaggccacagtcgccatttaaaagtgatatatatcccacatagtgaaaagcagcagaatatgactatattctgcagagatggatgtgcaaaatgtgagattcatcttttcaacctgcagaggaggtttgaactgttcaattctgaaattcccggtcagcatttttgatggcagtcattgacaggaactaagctgcacccccccacccaaaaaaagatgcaatattcacttgaataagggtaaaagaaaaggtgaggtcttcaggtaacagagaatcaaatcatggtatcaataaacttatcagtgcagcacccagcaccaagcacactggagtctggccctagctttgctaccaatgaattgtggtcacctgaagagttcatttgacttctcagttcttcattctttatttgtaggaaggggcagcaggggaatgcttacttcatgaacttgttctgacagtcctcataggtatgatgtgaactattaaaagccaggaccctcagatccctctggagcatctcctagctggaggtttcaagtcctatgggaagctggctggaacggagatgtggccactttcttcattatactcaggtgaaatctgtagtatattcactagtactctaccctatcctagactttactctgtgctcagtctccaagctggggtcatgcaaaacagcttttcctcaaacagactgaagacctaaaataaacactcttgactagagcaacgtaaattactattaagcgtagccatatggtcataggaacattgcctagaagcttgtttctaattgtttacattttattttctttttccctgacaaatatacatattgacattaacttattcaccattttggcaaaataggtcaggagagcaagaccatcctggctaacatggtgaaaccccgtctctactaaaaatacaacaaattagctggctgtggtggcacatgcctgtagttccagctactcaggaggccgaggtaggagaatcgcttgaacccaggaggcggagattgcagtgagcagagatcgcactactgtactccagcctgggcgagagatcaaaattccatctcaaaaaaaaaaaaattatattggctggcggtagttctctgatgatggctgctgtaattgttacttttgtatgtcaatttgattgtgccacagggtgcttagctatctggttaaacgtgttctgtgagaacattgttgcatgagattaacttttgaatcagtagatttagtaatgcagattgccctccctaatgtggatgggcctcatcctatcttttgaaagcctgaatggaacaaaaaggctgagtaaggaattattttctctccctgcctgatgggctttggctgggacatcagtcttctgccttcaggctgaggcttggactgaaacttacaccagtggctctcctgggtctccaccttgccaactgatcttggaacttctcggcttccataatcatgtccattaattcttatgataaatctctctcttgtacatgtgtatgtaaatcaacatatgtacatatagatatatatgtagagatacatatataaacagagccagtagatctctatatagagagtgtctatctgtctatctatctatctatctaatctttctattgagatatctcctattggttttatttctctaaaatgtcctaacacagctggcataggaaatgttgaccacaacttttagatctgggatgttgaagcattctctgcagatattatgatgggtacgtcatagagcatgattagaattcaaggatctgagcgttgagtacttcgtatttcattttgcatactctggttaaaaagcgaactaatcaaagcctcagaggggaattgagtagcccatgcaccaggctgaaatcattgcttaatatagatgacaagaagtattagaacaacatttttcagtatgtcctgtttcacatggctcagtggtagaaactttgtataaatgaaattaacgtaagtaagctattctctttggagacaaatgtctaaaacaaagcacaatggaaatcactgattctggtttaattactatttcacacatatttatagagcgtctactatatggcagccattctaggcacctagacaagaaagacatacaaaatattcttagtaaaagtatgaaaatcatacagctgatgctacaaagccctgggtgagctgaaagacaccaagaaatagggtgaacaaatacatgagctaaaagccacactgacctacctcacagtttttcagaaatcaatgagttaaaggtagtcaaagagttatgaaagtttctgtgtgtttcaaaaataagatgaggtgttattacaatggaaggcttaaagtagaaatcagactttgcaagttattagtagcagcccataaaccaaattacattttgcaagaaataaagtgggaaaggtactgggaaagtgagcttctcctttcagagtgacatttttgtgataaaaatatgatgggtgagaataacaaagtttggtgtgaagttccgctgcacagctattaaaactcttgtgaggagaactataaagaaactcccaggcaacagctatcctcagcaagcgcataatgaattatctataagactagttcagcgttaataaataggtttctcttatgtttgtatttgcaatagtagtgggagatattctaagagcttacttcatacatgagccattttgggaaaacaaaaaaaatacaaacaaaaacatacattgtaccatcataccttctttatggtgacttgggcatttgggctattctgaattccatttcatagaaagataaagttacatttcagacacctgccaagcacattctttcttgtcttcaattaaccttcccccagccccagaggtgtaatcggctcacttcccagatgcacactaagctccttctccctcacttttccttacttcctttacttccaaacactttcgctgatcattccattatatcccttcatctttgtattctttcctaccttctctctttcagttcttgggctttttctaatcaatttgtaaagccaggaagaacatgaaattaaataattttttaaataatttaaaaaattaaatgtttaaataattaaaatctacacactcacaaacgtctgccatgctgacaaaccaccacggctctcttgaccatctacaacctatcatcagaattgctccactctgtctgtgcctatatctcttctgggtcacaaactccacgggccttatcttttgattaattcagtattttattttcccctattataataccacaaagatactcagggctcaaaaatgtcttagttgatgctgacagtaatggaaacacatgaggattcatatgaattaagcagcaactatccagatgctgaaaacaaaactgggcccagtggcttgcggattctcatgctcagccctggctaaggccatggaatgtaaaacattgttaggccattttacaaaaaaactcaattaaaacgtacaaaataaagtgaacgcccaaaaggaaaagtgatttggaaaatgaactggttagcacttacagtaattactagagattactaccaaattactaaccaaattactggtagaatggccatattattctactccttaaaatgacgttgcataccaatttcaagtaattgtacataatttccttgactgagtccagatagtaatttgaaactgatccccacgcagggtctccatatttcttcccgtgtctctgactggagtttgatattgctttaacctgaagacaacactccccacccccacttccattcccagccccttgcctcttttggccagactaatagcatagtggaacacacagcaaaaaatagtgtttttacaagtctgaccttacgactctgtggtcactcacatgacatagtttgaaagggtctcagacaagttgcccacagcactctgggtgccccaaatgccaccatttattctttagttgggatgaagcactgggaagtaatttactggatccacttaacagggatatttaggagaggatgagatctccaactacaaagaaaatttcctaaaatggggaaaacactgggtgagggaatgaagatctgtatcacaaattcagtttccagaagcagatgctgaattggagtctggggttccagatacttattggagcgccacacctgggaagggaagagggaggaagcatgagcctccaggattgcaggccccccaagaaggggcatgaagcacaaacaatgcagccccactgcagctgaaggaccctcaggaggagctgaggagctgtgaggctggcaggaggcctgctgactaggctccctgcagttgggcaaggatccagtcaaggaggcctctctgatacatggttaggctggggacactcccagtaaatgtctactctacggttttagggccaggctttgtactaaagaattaggcaagatcccaaatttaaaaaaataataataataaaaaagaaaaaaaggccgtcttcagaaaacaaaaaatggcatgactagctctctcataaaggatacaccagtgattgcaaaaacgctgttgtcttttcaaatcagcctaaactggatttccaaattagcagccccaactgtgactgcgcagttgcttgcatttgtagtgctgaaaagttgtgttcacagataagagagaaccatctaacataaggctaccacatttcccccttctccagatctgggaaatgtggttgatttgcatatttagcatacatttgcattctgtgttcaatagcccctaactctaattatgtcaaataagataaattagtacatttcactgccattgcattctagccctgtggttaggggctaaggagacttaacccaactttttccttctccttctggcttattcccttctaggacagaagtcatttggtgttcaggctggggacatttcaaggtaaatccttaactacagaggagggggagggtaagaaaaagaaacaaccaatgatatccagaaatagagttgtacattttctgttctaacaagtaaatttaaaatgccaacttgatccaagtgtaaacaaaaaatgaacctcgtggatattttaataagttaacagaaggcaaacgacttttaaacaaaacaaaaagtattacaaaatcaaatccagtacatcatctttctgcaacataaaacttcctatcatgctgggaataaacaggtttgtagatggtgagtggttctagaaccaggaaggaagatagcaagcatccaggggaaggtcgtcattgttctccagtccgtcatttgtgtcccatcctctcttattgagatttataggtcattctggagtcactggaatcactcattgatatgttttgcatatcgtgatagggcctcacaaatcccccaacttcacccctttatctcacgggacgtatatttatgaagcactctctatgtgttagcaaggttgaaggtatcaagatgaacaagaactagaaacccagcttgctaggaagccacatggaaaactgactgagagagtgattacaatataacaagtaacataagagaggtgtgtgaaaaatgtgatgaatgcacagaaaaccaaatgcttacatctgcttgagaagcagtagaaatgtaagattgcataggccataagaggtttccaagaggagaaaatattttatcctgcttaaattggaagagtaaaaaactctgaagatcaagaggtggggaaaagactttctaggaagtgggaattatgtgtataaaagcacttgcattcatgaatttgaatgcccaatgaataagtccaaaaatatacaatgtgtttatgaaaataaagagaaagatgcttcagctgcgacagttgaaaaagaattcatggaggcagtgaggctttcccgcgaacaccaaaatggtccgatctgaggggcaaggtactcccggaaggaagaacctgcacaaacagatgcatggcactggatcttatacgcctcatgcaacacgtgaatctactggattaactcagccatgagaaggcagcagtaaaatagagaccaaggtgcctaagaaaatactgtacgcatgctgggggtcatgtatgcctactttaaaaaaaaaaaagggggctgaaacaatcacattaaatcattattttaggtcaggcaccatttagtgattctttatagaaaacacagacaggtgaattaggaacacacccgcaagagagcacaggattaattagtcctgcagacaagaaggctattgtagaaggctgttagagagctgcaaaattaccatattccaggtgtgaagagaggaacagctcagtgaggttggttccagtgggaataaaaataaagcacaggtattcaaggcatttggaagactgtcttatgaaacatgattttatttaggttaggatgacatacaggaatactgttagcgttttgagactgggtaaataggagaatgaaaaggacagggaaagcaggaagatgagaggcgatgggacagggaataacattattatgtgtcaactgtatttctagtatttacctatcaagtttatatttagctcatcaatccttataaaaaccctataaaataaaaattattcttctacactaaaaaatcacaaatcagggagatttcgcaaattgcccaagagcccaggggtagtgaactggagaggcaaaactgagtcctggatctactgcacttcagtttctgtttaagctctattcaatatgcctcacatgttccagtgagaaacataatgtgtttggacttagacacggtgagtttgagatgatggtggaacattcaagaagaaatatctagtgagcagtcagacataataggatcatagatttatagagctggaaggcatcttaaaaatcatctaatcgtagagccaaaattctaaaatgagattatagctggggttatccatttgggaaaaattcacatattagaaaatgaatgaagtcaccatatgagagaaaatatgcagtagaaggttaacgattgtcctttgggtgtgcccacctttctggggtggggagaagaaaagagattactaataggacaggacaggggcttcctgaaaaggggaagagacagtgaggtgcctcccacatccagaaggcagattgaggagcaggtatcaaaaatgttaaatggctccaataagtcagagaaaatgaggcaactgtctgtggtggatagaagtgtgttggttgccgtagagagaacctgtcaaagaaatcaggaaaataatataaggagacaaataccaggggtcagaaagattgcttggggtttctttatttgactagatcttagaaaataaaacaggactcatgaggagacatataaagtgggaattctgtgaatatatagcttggttatagtctgctatagtttaaagacagaacatcacaagttacaaaatagcataggcttttggtttactgagatgaaaactgttgacagctattataattcagaacaatctttatagctttgtgcaagctttcattagtggctacaatcaagggtctctgataggtgccacacaaataataataacagtaagttaggaacattaccaaattggttttactaaaatatataggtggttatactcaaagaagctatttcacagaactgaaaagtgattgctcagatttgtgacacatcatttaaaaaactatggtttcccataggagaccgttgccaaaaataaaagccttagttacatagaggtgcacctgattgaatatcagtggaaggagaggaattagagccgagtccaagctgtgcagctctctggctgacattgatcatgtgcagtggacagcatctacctggaccacacgctgtgccttctcctccactccctcttccaccataacaattaacttaccaatgagccacgaatgcaccccaccaccaaatgccaggtatcttcatataagacatggcataagacctcttcttaaatggactgtgtcattctctgcagaacagaatggtggatgccacttgctagcaatgtctaaaatccggggaactgataagctctgcatctctatgggctgcaaaacacaatatgggtccttactagaaaggagctagcatgttcaagtgttcagtcatctaaaaccacatcttgccaatcaccattctctttgggtgactgagttaatttctgcccgtggttaaacatgctgtttatcctactttagctggaggtcaagagacacagaaagaaaacacgattcattccccaataatatcacctacttcacatgacatcaattaattccccaataatatcacctacttcacatgacatcatagtttatattattaatattttgtgaatgacaccttggactgagctatgcagaaaatgaagttggtatttggggtaaaagggctttctcaaatattaaaaaaataatttttactgtctttgtgctacagttgaaaatatacaacttcagctgtcacctgcaataaagaatttttttctctttggaggtagcatataaaatattcatcatcttggaagcattaatttcaaaatagagcaaactcgtggtagaaaatcaaacagtagggaaaacagtaacaagaaaaataaatttctcttggcatgtaacatttcccctccctgagtcctcattccccctatccagttaaccacttcatcgtttctcctgtatcctttcagaaatgtcttgtgtagatacatgtcccacgagacagaaacacacacacacaaacacacaatttcctttgccttcattatacaaacaccattataatatacatacttttccactagcttttttcaattgtcatgcctctttaccctctttccataataagtatagggctatcacattcctataagggctacaaagtattccattgtatggattagcgtaatttacataactagtcccatatcaataaagctttcaaaattaacttactataaaactatttttgttatttgtaagcatttattatttctattttattttttattataaacatttactattctctaattatcagtcgttaaataacaagcctcatgaaccttaggaacttgaacaacaaccatgctactgtgggcatggactctgtgggtgtggaatttggcctgggtgggggcggcttgcccctgttctatgatgcctggggcctcagctgggaagtctcaaatgactgggaatgacagggcttgcagtgtgcacaatggcttcttcattccttatctgacaccttggcagcgaccgtgagaaggaccagctccagctgggggcctctccagcatgtggtctctgggtaatccgagttttcaggcaggtggctcctccagggcctgcccaatccagctaggccaaagctgcctggccttttctgacccagcctgagtcaggcagagtcacttctgccacattccattggttatgagcaagtcatgagtccataccgggttcaggaaaagggggcccagactcctccctgtgctgggggagtcgtggccagctggtagaagaccgaagagtgtatgagatgagatgtccctgcagcatctttggaaatgaaaattgccacaactgttttaaaagccagtgcccctgcctctgtcctctgaccttgagtgtttcctgacttcttgcatatacatcccagaacgccatcgtgccccgctcgcagaatgccagtggctcactacagtggaaagagcactagccccatggagagcacattggattcaagccactgagcatctcagagccccagttttatcattaaaaagagtagattaaactaaattaggtacaagcctctgctcacttacagaattttatcattctaagaccctacctgtatagtcatgcaccatataacaacatttaagttactgacagaccacaaatacaatggtggtctcgtaggaccataataccatatttttacctcatctatgtttagatacacaaataccactgtattacagctgcctccagcactcagtacagtaacactagcctaggagcagtcggctccaccacggagcctaggtgtgtggtaggctatgccatctaggtttgtataactacactctgtggtgttcacacacaaccacaccgcctaatgaagcatttctcagaatgtgtcctggtgtcaagcagcacatgactgtgtttcatcttccaactccttgttctgaaaaggaggaacaagaaataaaatggattgaatgcatacccagtttcccaagctattttgcactcaccccgaagatggggcctgaccgagtacaatgaacaacatcgcacagcctgagtgtgactccagcccggccacctagtacaataggcacgtttctaaacttaggaatgaggatgatgatacccatttgggagtatctaaacaagaaaataggggtactaaaatttcattttatagaacgatcactttttgcttccttttcagagcaagggattgaaatatgagagaaacaggtaggattgatgtaatcagaaatggtttaagagagtgtcaaaaacataagggatcggcagattcacagctccctgtccgcgctgcggcacctctgccagatcttctactacgcttagctttctatcttactctgcctaagctgtgccatgtgaaatatatttcctatcccagagagaatttctctcagggatttatacatagcatagggaaagttgaggccaggccaagggctggtctcatgactgtctagattttgttgcttgtaagaccagcatggaatgtccttttccatttacagtaggatttgggagaggcttggaggggcatgcggcctttggatgagagtgtggaagagaaattactggcaaagagtgaagggggaataaagagaagaggggaggcacaaggaaaagcagggtgtaggagctgatgtatctggatgtagacagcctggtttgacgttcagttccctttctgtcactaagatggccaagatctgggtgggacgtctcaccccataccacaaggcacatgggcccaaccagggtcctttgggacagacaggaatcattccaggctgcacggcctagaatttattatttaggtcagacagagtggaatggataacttcctctagagatcagaggctgtgcgctgtctctgatgtgtgacaaattgaaggaagcacagccatgccttcagcatgctcggtgagggatgctcatggagaaggaacgtgaaggagcctgtgcctgccttactttccatttgtttcagtttctccccccacgcatctgctgtccttgcaaagcaggaaaagggaaaggaaatgtcatttctctggagatgtaacaaaaggttatttgcttcggaaaaagctctgtcttaaataaatgaaagttgtctgtattgttcgtttgtttgtttggcttttttttggctctttctcagtctccccataaatcactgaaaatcaccttaccattccctgaatttgtaggaatctcttgctgctgtgtaaaggcataagaatgggccaaggcaaacatctctaatgtcttctttcaaaaccaaaatgcattttaataatttaaagccactgctctttcagtcacttgataaattattcacaaattttacaacaaaaaaaaaaaagaaaaaaaaaatctgttccctttacaagttctggaacattaaatcatgtcagaatagatgaaaaggacaaatcagccctaaactcttagaaatcatgccatttacttctttatctgagagcagtgccacagtttacagggcacttggcagatgatttttcaggacttatgtccaggtacagtgagagaatgacactgtaggaatgaaagaaggtggcttttgggcaatgtatagagaacatctaactgtttgcctcaggactgcaactttaagtgatattttaaagagatctcaaggacagacaaagaaagctgatttgcttaaggtaactctagttaattctgggcaagggaggaagtcggaataatggtggctccttctgttcttacgttaaaacaccccttacatcctcctaccaagcacgggcaagtgctacaaagttgctttctgttcaaatgtccatgggacataaccttctggagcttagcaagcaggtacttctgacctcatggagtggagaacctttgcctagaaaagattctaaatttgcatccacaatgataacaatgccccacccacatagtcatgttgtagctgaagatcttggaatatttacaagcatctctcatctcattagaaaaacatactcactgaaaggtccaagtgattgataatgaaggccaactgggcagaactattaggttttccttcctgatatttcctaccagagatgtctccctcttacagccagtgcccagggcctaattacaattaatacattttgtcatcagtattttgtcttccaactccatggtttacttttgttctggatctaagaaaggtagcagcattgtagaagaactcattaggatatcacacttcaattagtacagggatgaggtttgtctgaataaatacagcccattccattctaacacagtgctggcatataggagatgtcaataaatgcttgcttcccgaatgaaaaagtgaacagaaattgcagaaatacgtcaaagtttaatttattgtgtgtgtaacacaagcatagacaccgttcaatatgcaccattttaataggcagaaatgggctattagtatttttaatttgagagtggcaaaacctaaactaatttcatattttaggaaagagattctggatgaagcttccatcatcatccgcaaggcaactttttatctttgtggggcctttgtaatttttttctacttgctatgccttcttccttttataacctaaatttttctttaatgctcctgagatgcctattttcagggaattctgatgtcaagggtgttcttggaagcttctgagtgttggctaaaataccttctcttccacttcaaagaagtcctataatgctagaaccatcttcactgacaatatctttcttcaccctccaaatctcactgctcagcttctgggggagtcaagttacaaaagagccaacatatgaaaaatccattgttctttaattttacttcaacaagatagatgcagacatccacatcagcatttggagaccggagaagtgaagaagcagaagagaaaaatcactgagtttctagagtatgctctttatttagacatgcaacttttacacagaataatttaagggaggttacaaagatacatacaaaagagcaagataaaataaagataagaaagaaaaatgggccaggcacggtggctcatgcctgtaatcccagcactttgggaggccgaggcaggcggatcacgaggtcaggagatcgagaccatcctggctaatatggtgaaaccctgtctctactaaaaaaaaaaaaaaatacaaaaaaattagccaggcgtggtggtgggcgcctgtagtcccagctactcaggaggctgaggcagaagaatggcgtgaccccgggaagcagagcttgcagtgagccgagatcgagccactgcactccagcttgggtgacagagcgagactccatctcaaaaaaaaaaaaaaaaagaaaaaaaaagaaaagaaaaatgaccctatgatgagaaatacaagaaacaaagtcagagcttgatgagctcagcaaagcactaacactctttacatctcccctctctattatgaagtatgccaacatcatcttaccttgtttgtgtccgtcccacatggtagtagtatgcaatttacaagccacatccaaagttatttaccttaagagaaatcagcatatgtaatttagaacttttttaaaattaggtaaggtagttctaggtgattgttggtaacttttttggaagtctatattacaaaaattattttaggtaagtttcccaaaagtgtctggctgtcttggttcaagtgtcaacttcactgataactatttttacatcttgggcacacagcaattgttgctgttcctctcctaccagacccaagctcatccatctggtcagaaagattttttgagacatcatagcaaaagtagccattttcctcccttttcaacctttcttgcccaggactccgtattatttttcttaaaatacttaccaatatttaaaactgagtttgtttatgtgcaaataaacaaattagaatataaactggaatatttaaaattcagtttgcttatatgcaaataaactagatatgaactggaagatataaatatatatttggaatatataagtgtatattccagtttatataaaccagaatataaactagaatatcaacgccatgagagcaaggcttttatctctcttgttctctcttaggcctccagtgtctagaacatggcctggcacagagcaagtgctcattgaaagtttgctgaattaatgaacaaatgaatgaatgtataaatattttggataatatcttgtcacctctaatttcattcaaatattgtctttaccttatattagctgggtaaatcagctgcatgaaagaaattctcttaacgtccagatttttcaatttccatgttccctgtaaacatcctctcttcatcccgcccatcctctcccacccacacccctgctgccgtgaattgtgtaccctcctgtctgagggttcccctatacctgggctccgttcccacccttgcttctctcctcaaggacccactgcatggatttccagctccactccctctggctcttttccaacagtgttgaagaatactaagtcgatgcaaagctacaatattaaagtatgaatacttaaggacttctcctccatcgcttttaaaagacaagagcctttgttccaatgtcatcacctagaaaggtctgtaactgtgttgagtagcaatgaggctggagagctggagaggctggaaatcactaaatttacagcggaaaaggcagacttctcccctagaaaattagaatagatcctaaaggcatatccaggagacagaagaatcaataactcattctaactgggtttagaagagagtgtggggtggttgagaagaaaaggagagctatttggagtgggggacagaagaagggcttgtaaaatatggaaagaaatatagagaaaaaataattttaactacatcgatgtgcattacaaagagagaggccctttctcgctttcaaaagtaaagtattcttggccgggcatggtggctcacgcctgtaatcctagcattttgggaggccgaggcgggtggatcatgaggtcaggagtttgaggctagcctggccaacatggcaaaaccccgtctctactaaaaatacaaaaattagctgggcctggtggtgggtgcctctaatcccagctactcgggaggctgaggcaagagaattgcttgaacctgggaggcagagggtgcggtgagccaagatcatgccgttgcactccagcctgggcgacaagagcaagactccatctcaaaagtaaagtattctttccaataatatgtgtgactgttgttgcaatactgctatttattgagtagaatataacaaagagcaagaagctaaaagcaacaaagcccagctttatctggattacattcagattttggcatccttgaaaagcaaaacaaaacaaaggcccttcctatagctattttcatgtactactctccttctcacaacttctattatacaaaggttgtccccactcactgtttataattccttccttctcactcacatttcacccctctgccatcaaccttctacccccattaacccttgtttttgaaatcgtcaatcatcttgactaactacagtgggtgttttagacccttcgttgtcacagaactgaaccatttggtggttcacttggacaggagctataaaaactccaggcctatggttgcagtgagccaagatcgtgccgctgcactccagcctgggggatagagcaagactccgtctcaaaacaaaacaaaacaaaaaacctccaggcctaatctttccagcatggctaagccatcatcctcgggaaatacagacgcttgaccatggctgtgagaagtgcagttaccgcccctgccccaccccggtgcagccctatttgctgctgctgggcactcagctagcccatcacctgtgcttttgtttggttccctgggatcatcaagctctgtgtgtagtctccttgtagttagttcctccatctagtctagaggtgagaaaaaagtctgttccacaacaccttccctgggaagggtgcaattcggagaccatcaggagctctctgagaaagaagccactaatgtctttctaatatcaaactctctctttgccagcctcttatgaaggctaaaggtgaggagatagcaatatcgcaaaatctgttttagcaactctttgcaagtattgccagtggtctggcaccttgctttgcaatatggtaatagctcccattgttttgaagcttcagtcaaaatatagaaagaatttcatattaaaccacagtttccaaagatggtgggctgtatctcgtctcctggcttccaataagcaaggtggagttataggctgtctttacacactcttatcaaagtgctgcatacttgtttcttggtctggttgtctacattaaattgaaaacttctagaagctaaagatgcgtctttacatcacacacacacacaagcacatgccacaccacaatttactccactactcttgttccttccatcatgcttctagtcttttcttctctaaataaccagatttcttgtaagaattataatgtttgcctctacttttctacctcccattcagtcctcagtctactcatttaagtctggtctcatccttgcctgaaatacttttcattaatgtcatcaatcatcttgttacactaggtcttttatcagtcattatacctgacttacaagcaagcacttggttctttggactatttcctccttcttgaaatagtattcttgagcttcttatatttaaaaacaaccttgctctccagctaactttctggctgattcttatgtttcattcatccaagctaaagctactaagtattaaagatctccaagactctgtctaaggcactgtcttcttaatttcttctttatcctccatagagctaatccacacccatgacttcaggggcccacaccacttaagagcctagagctcttctgagcagcagaacttgtgatggttaattttacgtatccacctactggattaaggagtacctacagaactggaaagcattatagtgggatgtgtctgtaagggagtttccagaggagattggcatgtgagtctgagtagaccaagtggagaagatccaccctcagtgtgcttggcaccatctcataggctgggggcccagacagaacaaaacaggcaaggcaaataggtttctttcctggagcttggatacactcttatcctgcccttggtcagcagaactccaggctcgctggcctttggactctaggacttacaccagcaacccccactcctaccccaggttttcaggccctggaacttggcctgaacaacactactggcattccaggatccccagcatgtagatggctgtcacaggacttctcagcctcagtaatcaggtgagtcaattcccctaataaatcccctcacatatatctatatatctataaatagcttgttggttctgtctttctgaagaacactgactagtgcagattttagtaccaacagtggttctagaggttttcataattggtttggggtttctagaattggctatctaatctggttaaatctaaaaatgccaaagactctacttctaacagcacagagagcactgaactctctagtgcaaactgctcatagagatacataaaataggtacatttggtacttttaattcaccacttataagagacaagaaacttggtgacttctatatatgatacccttaacatttgtgcagaaccaacgaatataatgactttggttggttgctcctaatgtcagtggacaaagggatgaaggaaaagaatgagttcaggtattccatttcctgccccagctctacataaatagctgaagagcttctaagtgtgccctgagtctgaatctcctcccatgtagccacaggtctgggattgctgaaaatcaaacaagagcgcttatcatatgactgactgaatcacagcaaaagctgaactctcagctccgcaggcgtctgtggttaaagtgaggccattggttgagacagaatgggatctgtaagttgagatggggatgtgtgggagggctctgatgaggctggagacactgagctatgaaattctgatgagtgttatttgctagcagaagtggttcccacccacaatagtatagggttttccatctctgtctgaaggagttaaccctgcattgtctaagaaaatggtaacagcctccatgaggcagttgccaagcaagacaatgctgagtctcctcagaatccaccccccctgcccctctttgcttctggacctgtaactagacttgagtcccagcaggcccctagaggtgaggttcaaagtgtgattcaggaggaggtgtgccatgttccaaaagaactacttcagttttctaatttatacaagcagaagtctggggaatgcttgtgggaatgcatactgagagtgtgggaatatggtggaagaaatataaagttggatcaggccaaatttacttatatggaccctcagagccgaggtcctcaatttaactttgcagctcagggagtgagtttgtttgattgagtggtaaaacatggatcaaaaaacatgagccactgtgagtgagctggagatgcctgatctcccttgggctaacacagaggaagggattcaaaggcttagggagattggaaagctacagtggatttgtcacttaaaccctactcggacacaccaggagggtccagaagacagacttttcatcaatactttgaacaatggatttgtgaggggagccccagcacccctgaagagctctgtgattgctcttctctgtagaccagaccttacaatgggagctgctgttattcagttggaaaacttaaatgcaatgggagtaattggatcccaaggtgatagggaccaagtgacggcactcaaccgtcaaagacaagttgaatgcagttttcaaaatggtacctggtatgcacctactaaactggcaaatacctttttctccatttgtgttcataaggcccacctgaggcactctgccttcagctggcaaggccagcaatacaccctcactgtcttacatcagagatatatcaactcgccagctttatgtcacaatccagtttgcgggaatcttcactgcctttcccttccataagatttcatactgttctattgataaccttatgctgatcagacctcatgaccaagaagtagaaactactgtggacttatgggtaaggcgtttgcatatcagagcacgggagataatccaattaaaattcaagtgccttttaccttggtgaaatttctaagagtccaatggtgtggggcatgtcaagatattccttctaagatgaaggatatgttgtgtatctggctcgtcctacaaccaagaaagagataccatgcctagtgggcctatttgaattttgcaggcaacacattcctcacttgggtgtcttactctggcccatttgttgagggtcccaaaagattgctagttttgagtggagtccagaacagaaggctctacagcaagtcccagctgccatgcaagctgctcttcctcttgggccatatgacccagcagatccaatgatatccaagatgtcagtggcagatagcgatgctgtttggagcttttggcagggtgctgtagaagaatcacagcagaagttcttaggattttggagcaaggctctgccatcatctgtagataactactcttttgagagagctcttggccagctactgggccttaatagaaactgaacgcttgaccatgggccaccaattaccaggtgaccggagctgcccatcatgaactgggtgtcatctgacctaccaagccaggaagggcatgcacagcagcagtccctcatcaaataatggaccagcacaggccctggaggtacaaagaagttacatgaagaaatgccccaaatgtccttggtgtctactcctatcacactgccttctctcccaccacctgcacctatggccttatggggagtcctcatgatcagccgacagaggaagagaaaaatcgggctttgtggacaaatggttctgtatgatacagaggcaccagctaaaagtggacagctgcagcacctcagcccctttctggaagatcctttaatgacagtggtaaaggaaaatctcaagcggcagaatttggggcagtgcacctggttgtgcactttgcttagaggaaaaatggccagatgtgtgattaggtactgattcacaggctggatggtcagggacttgaaaggaacatgattagaaaattggtggcaaaaacattgagagaatagatatgtggatagatctctctgagtcggcaaaggatgtgaagttatttgtttctcatgtaaatgctcacccaaagatgagctccacagaggagtatgttaatattcaggagggtaggatgacccattctgtgaataccagtcaatctcttttcccagtcatccctgtcattgcccagtgggctcaggaacaaagtggctatggtggtagggatggaggttgtgcacgggttcagcagcatggcttctactcaccaaggctaagctagctacaaccaccactgagtgctcagttggcctgttgcagagaccaacgctgaaaccctgacatgacatcattccccagggcaatcagccagctacgtggtggcaagttgattacattggatggcttccatcatggaagaggcagcattttgtcctttctggaatagacatttcctctggacatgggtttgccttccctccatgcaatgcttctgccaatactaccatctgtggactcacaaaatgccttatccacgctcatggtatttcacacagtgtatctactaaggaactcacctgacagccaaagaagtacagcactgggcccaagttcatgggatccactaatcttaccatgcgtcccaccattctgaagcaacaagcttgacagaacaataaaatggccttttgaagttgcagttacagcaccagctaacgttgcaggactggggcaaggttttccagaaggctgtatgtgctctgaatcagcatccaatatatgatcctgtttttcccatagtcaggatacatggagtcaggaatcacagagtgggagtgtcaccactcaccaatacccctagtgacccactagcaaaggttttgcttccttttcccatgattttatgctctgctgacctagaggtcttagttccagagagagtaatgtttccatcaggagacacaacaatgattccattgaactggaagtttagactgccccccccacccccgcagccactttggaggcctcatgcttctgagtcaactggctatgttatggtgctgactgggtgactgatccggatcaggaaggggaaactggattactactccactggatgtaaggaagactatgcctggaatacaggagatcccttagggtgtctcttagtattaccatgccccatgatcaaggtcaatgggaaactaccacaacccaatccagggaggactactaatgacccagattcctcaggaataaaggttcaggtcaccccaccaggtaatgaaccatgaccagctgaggtgcttgctgcaggtaaaataatacagaatgggtagtggaaggcagttataaataccagctgtggccatgtgactagttacagaaacaaggacagtaattgtcatgagtattttcttcctatcttgttaaggatatgttttggtgtacatattatatacatgttataaatatgttaagcaaatatctttggttttgctcatctcttatccctttattatgtataataagattttttgactttatatcagtatatatgtgttgttaattttacatcatagtgtttcagttatcatccaaacactttaccttctcttctagggaagagattagtgcattttcagttgtatgcagatagtttcaccacgttaggtggaactatttccttgttactgtcttcatttggaggttaagtatggtttaatgggatgcaaacaggtgccaagttgacaaaggtggacctgtgatgattaactttaggtgtcaatttgactggattaaggaatacctagagaattgataaagcattattttggggtgtgtctgtaggggatttccagaggagactggcatgtgagtctaagtggactcggtggggaagatctgccctcactgtatgtgggcaccatcccataggctgggacctagacagaacaaaaaagaggcaaggcaaataggtttctttcctggagctcggatacactcttctcctgcccttggtcagcagaactccaggctctctcgcctgtggattctaggacttagcccagcaacccccactcccaccccaggatctcaggccctggaacttggactgagcaacactactggcattccagggtcccccatatgtagacggctgtcacgggacttctcagattccataatcaggtgagccaattcccttaataaatctcctcccattgatttttatgtctctagagaaccctgagtaatacagacctgtacaacttgcattctttttatcagctcttaactgcaaagcaattccaagtagccatgcccacagcaagttcataatggacttattataggctcataatggggtcttatttctgtactttctatttcgatgaatgttccaccagccattcaattaggccagtcaaaaaatggggtgtcatccttgatatcactcttttcttcctctgatatgcagtctatcaccaagtctcaatgattaagggtctttcaaatctgtgtgtgtttctccatttccacccatcactgtagcctaaaccaccatcatctctcatctcaactctcgccttgcatcccaaagggtctccaggtgcactcaggcccactgatacgcatttcttcccattgcagccaaaattatctttaaacaaacaaacaaaacatttttcatgtcatcattctcccctcagcccagcctcactcatatcttctattgttttaatagaaatgaagctcctaaatgtgccttacagacttggcactgtctccgcacgctgtgacctccagctccattggcttgcttttctccttcctgccctatgggctctgcacattctgttccttctctatgaaaccctccctagccaaactaactccagctccttcatgtctacagtcagagaagcctgctctggcatttttaactagtccaaatcttcctctcaaattggcaacaggcagttctaggtggctctccattcaatccactagcgcccttgccatctcacttcagtttgtgttattatttaaagtctatctccggggccgggtgcagtgactcatgcctgtaatctcagcactttgggatgccaaggcaggcaggagttcgagaccagcctggccaacatatagtgaaaccccatctctactaaaaatacaaaaattagctgggcaaggtggtgcacacctgtagccccagctacttgggaagctgaggcaggagaatcacttgaacccgggaggcggaggttacagggagccaccatcatgccactgcactccagcctgggtgacacagcaagactctgtctctcaaaaaataaataaataaataataaataataaataaataaagtctatctccagtgtttgctccttatcataggctcagtgtgcagtatagtgcctcacatccaggacaagctaaataaacaccagctaaataattaaaatctcaccataataaatcaccaatgaacaacacagtgtccttttaaactgaataaataattgattgagtcctcagttttctaaagcgtgcaatgggaaaataactgtttcacaaagttcttctaaagatcagatgaatagcccagcgttgcacttgtcatgtaacagactctcaatcacggtttgcttcctttatttctctgcaaaatatacacagacgatgacatggaggcaggatgtgatgtacaattagctatggctcaaaataagggcaacaaatttggggtgcaggttccccactaacatgtcacactggccactccattttccccaggcaccgtgcttctccgagatgggcacggtgcgtcctcagcttttcaccttgcctctctatatttctctgcgacagcagtagaatcatcagtagtagtgaaagagaaaagataaagaggcataaaggaaaaagaaatgacagttttcaggcatgccaagtagattactcaaatgcatcttgatttacacgtgacagatgtcttccttaaaaatatatgtaaactgaattgtacttggaattcacaagggaatcttggtacttaaagaaatcctctactgaatccttttggaataagaaccaccaacaggatgatgaactccccccaccaccggtgtttgcgtcatggggcattatgtaattcctttttactccagcataaggtaaatgtatgtatggcttatgtaaatgaagatacttctaatgttaatttctgatgaaaaaccgtccagtgggaggccagatcagaggaaatggtcaataaatcaagctcggggtccaggaatttatggattatagctggttggagctttcctgaggaaccccaactttcttcattgcaaactgaggctgaatggctgtagggtgctgaattcacacaagaagttgttagcccgatggggatggggctcaagtagtcagggctcttgggaatgagcacagttaatagtgcaattagcttggaggaagtgaaaataaaaaacttcctgagggcttctgtgagtaagacaccctgtgtgacgtgctcagcatagtgtctggcacatgctgggtgtgcacgggtgtgatttctgtgacttggctgttgagcggcctgcagtgcacattgccccaaccaaaggactcaggccagaaaactatgctgacgatctcatcagggatgggggagaagaaaaacaagaattcagaaggaaattcagatattttactgggcttgttggggctcagaaaatgacaacccagaagtctggtgcttctgcatgctttaacaagaagactttagaagcagcctcataatcaggactttctgacctcttctgccctcacccctggcacagggaggggctctctcttgaatttccttatctgattaaggaaacttctttccacaagaaaaacagtggtctcaagacttgctccctaggaatctcatcaaataaccaggaaagaatcaaggagactaaaagttgtcaccacacccagatagacttttcatctattctcataaaggcaactccgagaaattacctgggagactttatctgcataataagacaacctttgtttgcagtgaagttctgccctcacctttgcaccacctcccccagagcccagaggaactttgctctaggcaattgtttcttgggctcattcatttcccctgaaaaccatttcctacccctcatacttgtctacatcccccatttacctctctttcatttaagcctcaactatctggcccttctttgagtctcatattatgggacttctgtgtccatagcctgttgataaatttgttatggcatttttttcctattaatctgtctataatcagtcatttccacaaagctacaaagagggcagaagggaagcttttcctccaccctcacaggctaaaggtttcccatatgtgaccaaggacaggaggttgttttataatatttatgccataaactagacatggctgagatctataactacactgaggagttactatttctctcttatttatcaaattccctgagaagccagacattactgttgtaaaccaaaaataaaattctaagctccccaactttctgaatggaacccttctctcattcaaggccattccaaagttaacctgaaaaactactaatagttcaggctatgatgggaattgggcgttggacatgcctcattataccctcctcccttttggaattcaggcccagctcaggagttcacaaccagcctgggcaacatagtgagaccttatctctataaaaataagtaaataaatagaaaaataaatacacaaataaaaaaataagagagaaagaaggggtcagtccatcatcactctcccagccaaagttaaaatagtggaaccctagaacaacaaagcaggaaacaccgttgggaatgctcctcactaacctttcccctcactgctattctaccttctccctctgttatttaaggggaaaaaaatgagtgtttgcatgtgcacgtgtgtgtagttttcattggtaatggttgacgaaattggcgttaaattgtagttcaaagatttgtctttgatagatggcattctctatctgaaatcagaaatcagctatatggcttcaaggaaacatattatcttataacccctgaatgtcaatatataattctaggtgactggatcaatgatgcctggtgagtcttgaaagttttgccatgggctggcaaacaaagattggtcctaaagtgtgggggaaaaggggagaggagaagagatggactcacactcagctggaaaaaatcttggacacccttttttgagcttattggttgtcaatctactgattcaggaaacacttttcacctatttggccattaatacagcacaaacaacacacagaggagaatgcatttctatctaatagagcaacagatgccaggagctgcccagcactcatccatgcccaacttcctcactccaacaaattgtaaaatcataataaaaaaatctaaataacaacagcagcagctaaattatttctccatctcaattgatttagatggaatgtcatcttgacagatctattctgatcgagttgtctaattgaatagagttctcattgctcttgaatttgtgacctcagactgctgtgaaataaatgcaatttggagaattgtttccaaacaacaactgctactcctctgggaactgactattgcttctagtttttgaaattgttggtgaaccacctactgactaagctattaagactaggtgttttgtttagattccaggctaatggttctataaattcaaaagcaagaaatatcgcagaagcctgcagatggccgtgcacttaagaggagacacccaagaggctgctggccaggctcctcagatcctgacctagttagcagcccgcaccctgggcagtctgagtggtggtaattagagctgtgtgtggaaaaacctgcctaatgaaactgcttcagaggtcgtgagtttgtttgaattgggatttttctctggacctaaaactaagactgagcttgcctcaatgttcaacaataaaacgaaatgtttcagagaccccacagagttgcagttgcattcagaacccagtgtacatgctcagtgacactgggatcccttaagaacttcagctacttcttggacatgcatttatttcaccgtagtgctaaacactaagaagtccaaatggaccatctccttcagtttacacaacactactgtggaggtactgacaattacatacccattttataattaatgaggctcagctgtgttatagaacttgcccagtgtctatctcacagatcaagggacagagctgggactagaaagcagttctttttttttttttttttttttttttgacagagtttcactcttgtttcccaggctggagtgcagtggcatgatcttggctcactgcaatctccgcctcccagattcaagcaattctcatgcctcagcctccagagtagctgggattacaggcacctgccaccacgtccggctaattttttgtatttttggtagagacagggtttcatcatgttggccaggatggtctcaaactcctgacctcaggtgattcacctgcctcggcctcccaaagtgctgggattacaggcgtgagccaccacacccagcctggaaagcagttctgactccagagcccaaatttcaccaccatgctaggtagatagttcccaaagatggaaggctgaaaatacatgggacatattgaccttcatgatgcaaaattaagagaccaatttcactttaggaacacccaatagtggcaggataatctagtcacataaaaaaaaaaagtgagcccttgagtcaaattgcccttccataaatcctagttccagcattttcttccagtataagcttagataagttatcaaatgtttctacgcctctgtataatgggaataataccattgttttgagaattaaacaaactaatatgtgtaaaagcagaagtcattgcctggtatatagccaatgttcaataaatgggaactataatttaattaatgatgcatgtcttagcattcatagtcttcaaccactcctcaaatgcacagattttctaaactacaaggaatgtttcagaatgtgagcatgaagcctctctactttggaagggttttttgaaatgcagcctaaaatgtgacttttatacaccatggttctcttctttcttctctttgctgcctttcgacattctctttccctctgcccctactagaatgggggcacctttcatcgatgcattaatccatggctaaaacatgactcatcgtagaaatgcaaaggaatattctgtctgtgtagcaggcaaggacccatggggcaggttctcatcagaatgctttacaataatatcaatcagtattaaaaatgtatgttctactcaatttttaaaacatcttaaataaatctttaaataaagctattttgttttatctttagggcctatgaacagtcagccctgaggggcccttgcttccctaagaaccgccctttctagaaaagcctccctcagtgtgtggttttctgggggatctctgtgctgggggagtcaagtctttttggtaatattaattttagattgtgtaggcaccatattaacaggggaaatgaatactattccattagggtcgtttaccattcagaatttcttcacaggaagcagctagttaatccttgcccttgaggaacacacactgtactcttctcctaataccattgaaaatgtcagcgagtgtacaggaaaggaaaagagggtactgcccttgttacggggctggaaaaactcaggagaagctgaaaatggaagtagatatttccagaaaggaacaggctgcctcttttataaacaactttgggctggcaaaggttgctggcctctgtatccccaccagtgtttccttggttgaaacccaaatccctttagcaaccagagtgaggctggttgggtttcatgtaatagagggtagtggggattgaagcaaaatgcagaatgcatatggtaaaagacatccatgtttatttagtcaacaaaaatatcgacagctctctacctgacaaggcaaatatgctggcttcctggatctgacaatcatcccctatcctgaccatgaaaatctgcccagagtctcctactaaccagattttcctgcttacaattcacagccctctaacatatcgtaagaattgccatccatttttacttcaaaaattgttttctatctacgtcactgactcccaacagggggccgcagctccttttgcaatatgaaccctccacattttctcaatccatccttctaacactctaacggtaaaagctgttttacgttccctggtctttccatgggggttcatgcctgtatgcatttccttatgctgttaccttttccaggaatgcttttcctcctccatttgtcctttgtctgcttcaagaaattggctcatgcctgtaatcccagcactttgggaggccgaagctggtggatcacaaagtcaagagatcgagaccatcctggccaacatggtgaaaccccatctctactaaaaatataaaaattagctgggcatggtggcacacccttgtattctcagctactcaggggactgaggcaggagaatcgcttgaacctgagagatggaggtcgcagtgagccgagatcacgccactgcactccagcctggtgacagagcgaaactctgtctcaaaaaaaaaaaaaagaagaagaaaagaaaaagaaattcaacttcatgtaaatgtgactccatcaacatgatcccttcaaatgacctttaccctgactgctctctaagtccagtagaataaaccatttgctcatcgatgctccaaatgctcactgcacgttgctctgttacagcaccagcacgctatggtcgagttagtagtttacacggtttccttccccactgaactgtgacatctgtgcatgtggaggcctggtttaatgtgccttagttatctcacagctggcaaatctgctgacccatggtaggtctgagagatgtagaatgagtcaatgaaaaaaaaattgactaaatgagttccaaaacatattgtgtcccaaagctgtttggtaattttgctccctgaaatcatttgtagtcagggatttctaaaaagaagttgatggtcaccatgaccaatagtcatgttatacctctaggagacaacaaaacacaggagcacaagcgagaggactttcagcaacagcacaaactcctgcccatcaaatacggcctgactaataacaggaagactgacaggagcatgacaaatgatgttacagaaagaaaagtgaaagacattagtcccctcccccaaagaaacataaggtctctctctctcacacacacacatatatgcacacacgtgcacacataggtacacacacaaacttgaggtcagaagacccacatttagattccccctacaattaattagctgtttaactctgagcagtcactcaatttctctgggtccctataaacacattattttccaaaacagaaaaacctagtgtatatgaattccaagttttgtgcttacttgaaaagtctaagcttccaagccctctccctgggtcttcccactagccttctagatacttccacaggcactcccttgtgcaattcaggctaagtggtctaaggagtctaggagacttggacaacagtgtggtcaccacccccggattgaccacagcgccaccagttctcaccagacagtttcatcttatttattgtaaacacaaagataaggtgctgcttggttagaaagacatagcgcattgatttgtacatgccataaattggccctgcctttgcactttcacgttaataagtgatgatagaggagcctcagacaggagtctacttgggctttctaaacatcacatttggtggtcacaggtaaggatactcagccttcagacctgcaggattgaggcttgcagtggactgtgggcaccagcttgaggaatcccaaccacagcagctccctgcaccagaatcacaggttcctcaagccctggcaaaccccggaagagcgtcgctcaggggtcgctgtgccatcgctcctcctcagaagggcaagggtgcctcagagacagaagcatcagtgcgggatgcccaccacccacacggcagagctgaaagcgaggagcagcttcagctgcagcccttgggaggtcgtctcccttggccacccaagtgaacagtctcctgcagggctgtctatctgagtgggacatttttccacttctcacacatccacactttaaaaaaaaataaccagtctaatggtatgttaataattccagatggaaccccagacctcaagggctgagtgtaacagaaatttcatgtaggtcaaaatacttggatgtgttctttgggtccaaaaatagaagtggtgttcaggttgtgcgaacattctgagagaccatttcataggcatttctcagaagagaaacgtgtgaggctggaatgcttctgcatgctgtgtgccacagcttcctggaagatggcagcccaccccaacccaataggagcttcaaggccaggtgagatcaccagcccttctaccgctgccatctgcactttgctaaacagaacctgcaagaagagcctcccaactgaccaggcttcagtccgttgtggagagggagggtgacaacacaggaggaaatgcttcacagggcatttcttccaactaccagcctgtcacatcagtgtcggctgatgtcactctgaacagaaagctttggggcccaagaaatgccaagaaaatggcagccagtgggcagggcagccaccggcctcttcttgctaatatatgcagcggatgtggcatttctgacaatattgcttctgcctcacttgccatttaatgttaagaggcttctagaatctcctgcatttaaagagtaatgactgttttcagggtaaatgctctgttaaataaccctggattattgtgtcgtgttattacatttataaaatggcatttcaaaaaataataattgttttagagttaattgatgtttttaaccatcactgtgtggagaatttttattcagaagacagggagtgagcaagggagaaagagatttccatcgagagagtcggtactgaaaatagaaacctttcctgcatgtgaaatcctggtacagaaggcactcctcctctgagcactgctttcaataagctcgtttcactgcaattaaagcagccgcaggacaaaggtaaatctcagccgcattcccgaatggagtctgcaggcctcgggactggcagtggtacagcagggctgggggtagggggcctcagcacatattcgccggccattatgcccccacaggggcaggccgggccccagagcagcctgaagcaacggcagagacctgcagctccacagagcagtgacttttcagatgtgaaggtaattacacggccgagagtctcagaatttcataccgcaagaggcagagctgaatgcagggatattacagaataaaacttggaaattccaaaatcttcacatagggaggatgcaaatggcgcacaaccctgaaccgcatcccaggtgcggtggggatgatgtcactctcttccttcctatctgaatccttctctcactctcctcaagcatgtctagagggcagtgcctcccattacgtgagtgacagatgatcccttcatcacctggtttcttcttacaagtatttccctgaagtaggaattgggtataatttttatgctagctttaaatataaatatatgcacacacatagaagataaagctcattttcatgatgatggagcttaacagacagcccaagtctttccagttgcaactcaattgctgtttccgcaatatattctatcatccagaatcttcttacaaaccctcaggaccattgtggctgcatgacaggagccagagaatagcagaaagtgaacaaagaccccaggtaatttggaggaaactagaaagatgttggaatgcaagggtgaaaagaatgatggagatcatttagcacaaatctctaatttataagatgcagagattaaaactgagaacgttaagcaaccttccaagatcatacatctggatattaacgctgcaacagcaaccctcatcttctgactccagaaatcctacaattcaccccaattctcttctaccagtccttgcaaaagtctgcgtgtaaacaatatccattttctcccttactctcaaccaccgccatcaataatgtgcagggtcaactttgcgaagaatttcaagagaattttgatatctcaacagctggaaaccagtcatttgagcaacagatatatgtcctagcttcttgaactgccaaataaccagtagatgagtcactaattctgtgaacccagaatgaccctgcaaacaatcattctatggtgcagaaagagacacgacagaaggaagttggaatctattacctcctaatcaaagcacacttggcagaatgccctggcttttcacacattcatcaagacatcccgaggagagtttgcctgattgtctcgggaactctcctaagagtaagtggactgacatgttatgcgaaagaaagtcaaacacagagaccagtgagcgccatctgacagcaaagatagcaagccaagtgactctccagtcatacaatgtaccatgagccttggcatcacatgcactgaggggacccttctcctctgtcctcacactccatagcctctttagcacaaggccacccaaagagtgcaaatatgacttaaagacttcacagaaagtgtgcccctttctccatttagtccaaaaatgataaagtttgtagttacagctctgtgtatttaaatataaagaactctaatatttctagacttgtcaggcaggtaattccaagagttggagcactctttgctgtcacccagggacacacaggagcttagattcagaatgcacagagctggaagtatcaggtgagttatccctttgttcctcttcaggacacaggaaatggaggaagtagaggttaatcatcttgaaaatttggaactaattgagacgcatcagtgagattctgggtattaagctctgggaccattagaacacttggaatcttcagcatcctatacagcaactcatggaataacatggactctttctgacatataaaagaaataaagtccttcaagactccaataaaaaaaaaagacaaataaatagctaagactgcaaagctctcagatataatattgaaattttgaccttatctttcataaagcttgaaactgtgatgataaaatattgtgacagaaatatttatatagtatagtacgttgcaaattcaataggtgaccaagatagttttgaatgattttgaaactgttatattaggaccaatatacaactcaatatatgagtcaccaggatacaataaacccctttccacctcttggttatgaggtcgggaagcacaattaataattaacttcatcatcaacactaacatcaatgtcattattataaaaaagcatattttttatgaagcacttcatgcaactagttaaataaacatttggaaacctgcaatctatatacttacaaatgaaatgaaaggaaaactctaaaatggattagaaaaatatcaccaagacaacccctatgacagctttcaacacaatcctattttactatgcagaccaacaattctcaaatttatcatctcttgtatcaactatttggaataccatcctaactggggttgctttttgtttttgtctttgactctcatctcagcccacatcgctccatattccatgtgctgctgctggaatgactggttaatacatcttgactttgctcagaactttcagtggcttcccgtaggataaaatccatgccagatcttccatggggactttgaaaacaacttagcaaattaacaggcaacttttcaccatatatcaaatatatgtcagggactatttgatgctttcgtatttataatcttaatttaccattagaataatccttgaggagaggcattagtagagttggagttgcctggagagacaacctggagaatgttatacacaacctggcaaatattctacatattaccacaatctcctattttttctgtcctttcttttattatttaaaagtaagacataaacaaatcacagattgtcataactgcattgattgaaattgatacatggcaacattatgagattttatgcatttgtgctggcaaagtaacttaaaatcaatgatttggagagaaattattcaggaaatcttaatgacttattatggtaaaaacacttctaagagcggatccattaatggaggactattactggaaagttaaatttaatattcaggaaatcaattaactagtatttaattacttaaaattatgatccattagtaaacattggtaaaatttgcttacaaatatcacttctgattatgagtcatcgggaaacaaaatgactaatattctaccatcgaaagcaatttgattcacttcacattccccctttctgtctttctgtgaatgactattgtgtaaagccagagaccattagagcagaaagatgcactgaggccatctgacccctcctcatttcacaaggccgactctcagtccagtatagtgccgtgggcctccaaaggttgcacagctcaacccgcactgccttgggactagaatcgaaagctctcagcttctagggcagccccctttctgaccatggctccttctgaaatgacccacaactccaagagggaaccatagggcacataccctcattctttttctctttttggagctagtaaaaatccatatctgctttagaaagtcatggggccaaagtcctttctctcagctccacaagagaaggtgggctacatagcactctcgacggactcctcccctctctgcctctgctgcagctcactaggcatcctttcgactcattttccggtgttttctgtgttgctattggcataacatcctatcagtgcagttaattacatccacttggagtgtgaaggacaacttgattgtctcaaaaagccagaggccatataatccatctcactgctctcacaaaacaagttcccaattgtctctgctgcgaggaggtaagagggacacccctggcaatgtgctgacacacattccctgccgcaaatggagaagtcacaaaagaagtgtctgttcctctccctctatgggcaaagagaactgccttgtggccctctgctccagatccacgactgagactcttcgatatctccacaatgcttagtgtcttcccagtacaagtcaatatcgcttgatccattctgaacttggtaacatttatatgcaactgagtttgcacatctaattacacgacctggtaatatggttcgtctcttgtgaccatacattttctgttccaatataatatttatggactcgtttagatttactacatgttacccaatgtcttgcttctgtatacggaaaaataaccagaaattaaaatttgttgtagttatggccatgatgtctttatccctttgtccttaatccttgaaatggaaagcagactaagaaaccagagtcccagcagagagtgaacggctgtgctggaaggcgggctctttacctgacctcagtcacactgcccctcaacagggcaccttgcaagaccaggatgtcgaactgcctgtggtttggctgattcctgtaccaacccatagcagccactgagtcatgaacaaagttgggagacgggatggggatcctccaggcagtgtgaaaccagagccccaaggagctggctaagaaagtgttgcagcagaattccatacgccattacacaacacaaggtcttttgtgtgactctcaagaagctctgtgtggtctttgtgtgagagctcctgatgctgctccctgcagctgatttgctttatgagacaaatgctataagttatataaccaatcacattgccctccaggtctgacaaccttgcggcctgtgcaagagctttgttcttctctttatgttattacccttattttccttttctttctaacaaaaagtttaaaattacattaactcaacatctatgaccttctagtaatagagaagtatacagaacatgtgtatcccatctttaccttgctgcctcattctcattcacctcttcaggggccctgtttcttgcttgtgtgtaaaccaccagaccctatctccccattttcaacattatatatgtgaacgtgtatacacatctatctgggttataaacatgtcatatgtactgtggcacaatctgctttttacctcccggtgaggcatgcacatttctggcatccacatgtgctatgatacctcattctcacaccagctgcaaggcatgacatgggaaggctggcaagacctcagcctgtgcaaccatttaggcagtttccacagccttgcccagccaccactccttctgggattggaccatcagaagtacatcccaagagtttttctaaattccccctgcagagcctgggaccaaaagtcaatcagcattcaaatctctaatttgtatagatatggacaatcaccgtctccaaaagactcacacattgataatctcaccagcagtgtgtaagtgtcacctttccctacagtcctcagtgacacaaactgtttttattcatttttgagaggtaatttgtatttagtgctttaatttgtatttccctgataactcataaggttcagcattttcccacatatttattcactattttatttcaagtaattgctcattcatattttttgtctactttctattgagtaatttatctttttttggtggtgatatgtgactgttctttatataatctagatattaatgctataaatattgctaatcatgttttcccagtctactgcttatcttttctacagagatctttcatatttaattaggccaatctatcaatatatcagtcttttcctttattgcttttgggtttttcctcttaattacaaaacatttcacaacttccataattttgtaagtgtgcatgtatgggtaaaattctttatttttctgatgctgtcagaagtttcatatttatattaatattcagatctcggatccatctgctattactttttgattgtagtataaagtgtagttttacccatttctaattgatggtaacatatatatgcatccttataagcctctttatactccttggaaataggacactaattcaaatcagctttacagtctcatcacactaagagagactccctcttgtcaggcatttgtgctgactctccccacccatgagggccccttttctccatgactctggggttccatggcctagtcaagctgtatcaatgtgaaacatgaaaaacggagtcagtggcaagccttctactgtggatgcgctggcactctagacaggcatggacgtcactgaattcccattagagttgtcaaggtggagacaggtaagtaaaattcacagttcctaagcttgaacacacaatctgaatatcccagacagtaaacctggaaagaaagcagaataaaagaagatgcaccatgaggatatgaaaacttgcacagagtagtagtacacgtagagctttggcggctgaaggaaggtggtagaataaagaggtagaagtcaccggaagagaagaggaaataggctatgtgagtgtttaagtaaagagaatgtcatagaagaccatctaagactttgtaggggtgttcgagtgagcaaagtagaaagggaagagttgaggctaccctcaccctgcctcctcccttcacagaggggctgaggatcttactgcagtcggcagcagcatggggtgcttaccaagacagacgacacattagacctttctactaagtaggaaattaaactttcactaaggcagcatgagtcttccccttcctattttattgtaagatatgaaaggagcttcccatgaggtcccagagtttgttttgcagacactggtccctggagatgagtcccccagagcctagagaatgcaccccttccagtgaccaagcccaagctaccataactaatccatcatctgtggctagcaaggctggctcctgagtgtcaatgtggagttaattagacaaataccgtacgctctagtccaattgattattaagacaccgtaacgaggatttaacatcacggcttgtattggaaacactgtattataacttgcctgctcaccctagaaactctgtggagtcatcaagggacaattagcattcaatagtagctatggcctttttttatcactgctgatttaataagacagttattgttctctatgttaattaatatctattgattaaagttgaaagctgggcatcaggaatatatgctctggttcactctggagtagttagcatgtttttctgctcagcctgacttgctacttcctctctatgctctgaaagggattctttcaggccctgaagagatcccagacagatccaacattggcctagcaattaatggagctgggagacagatgcttcttcctgggaattggggaaagaagaaaattaacagtgttctgaggtacctcgttccctccaaagaaattctaagtctagaagctgtaggttttcttgttgccatggtacctggaactagattggccaaggtcacccttccctggtgtctacatgaagggctcactactgtacctggggaacgctctgatttccttaacatgaagtagcacaatggcttgcttatccatctctgcctctttgggctgggttttctgctgtggtggtgattaatgtaattggagggcctacttggatcatttcaaactcctgtacttctgccctgaaatgaaagaaatgagactagatccactgggtctttatacagaaaacaagcttttaatctatggtgctccatgatttctggaagaaactcatccacttctacctccatgcttgtgtggagtggccacttttaaaaaattgttttaatatgttttcctattttatgattagagttagttctatgtcactggtgttggaaattacctcacaataaggtaaaagcacaatgtaatctttaatttactaatttaattaaatgaataaaatatgatttttacctttataatgcgatttttaacattcacgttttaaactgtttttgtatcccttttttctagtactatgtttattgaggaataacattcataaagtgaagtgcatataaagggcactgatcttaagactgcagctcagtgatttttctacacatctactcttggttgaccacacccagatcaaaatacagaacattcccatcctgctgcaagttcttctcacgtccatttgtaggtattgactctcaagcttccctgtacctcctgcagcacctgtactgacttccatcatcattaatttgttctgtcctgttcttgagctccataaaattggaatcatacagcgtgtgcactttactgtctgggaaacattcctttttaaaagtaaaaatgagtgtatcaaaagcaggggtctttgatttttttaagtcagtttatcacactttatgatatctccaataattttttctagtaggtttaactgaaatttttcatctttcttaaactcttaagaaccttgacattctaagttatgattccccaatcaccaccaatcttaccagaggacatttaagttacaaaggctatagaggtgtctatttcacattctttttctcaacttacacgtgccaacataaagcaccagggttgaaaaaaaacattgtcacttttgtcactatagccaccttatgaaataggaaagctgggattaggaaacaatacaatgacatcttggactgactgttgtcttatctttggacacttgtgtatgactcaattaattatgcttggaaaaattcaggccgaattaagcctaggagctaactgtggataatggtaaaacataatagacagaactaggaaacatgagatgtggcaagattcagtacattcactggcaactgagaagaccatcaaacccagaaataggcaacatttgagagtataagtagatagataatgagttgggcctatagccttaagcctggatttaatcacaaggttttggtccttgaaaagagactagcaagagaaagccagggcctcagtttcagggaaattaatttactaggcaggctaccaggacgcagaccaacaaggtaaaggcatgttctaagacagtggttctcagagaggggtccttggacaagcagcatcagcatcactgggaaacatgtgagaaattcacatgtgcagacatccacccagacctactgagttggaagctctgggttgaggcccggcagggtccagatgaccctgacccaggctgaagtctgggaactactggtctaagctgttagaatgaagagtgctaagtggaattaggtggaatctgttctcaggagttagggtccaatgttagagctgagctagaatcacagaaagcagtgttgggtgccagggcgattggctgcagctcccaaagcctctctggtgtcagggctgatcctggggatgaagaaactctggaacagaaccatcggaatcaggtagagcctgatgacacacgtgcccctttccagtggatctcagcaagtaccgtgatgtgttgaattgctcgcttctgtctcctcacctcggaattacaagctttttaaagatagaggccatgctgttcatctccacccacagtgcctaaaaaatgcctgaaccaggacaggagctcaaagaacatttgtagaaagaatgacacaggaagtgagtgaatgaaagaatggataaataaaagacaagttaaaagcagagaatgcgtattgtgcgagtccacatacatgaaatgtctagcataagcaaattcattgagacagaaagtatttgaagcttgccaggggctagatggaagggggaaatggggagtagccgctaatgggtttgggctttctattagtggggatgaaaatatactggaattagatagtggtgatgattgcacaaccttacgaatatagtaaaacccactgaattgtacatttttaaagagtggattttatgatatgtgaattatatctcaataaaaataattacatttcttaaaaagcagaatgtgtgaatatcaagcaaggcattttggaagaaacatttcataggccaaaagctatgctgcaaagacctgggagtctaacgcagtgacacttcacaggacaaaactacaaagacaaaaggagactcatgcaaatggactgcatcccacctcctggtgcagcttccttcctcaggctcctcatctgtgaagtggagagaacgttggctctaaacactaaaactaaaagttactgtggtttgcgggagagggcaaaagagcatgtgaaaagctacatcagttaaaaggacactgggtgctctgggtgctgtcttggatcgcagcccccctggagaaggacagggtctctctgggcccagcccactgcctccgaagccagggtgcacacatggccccaggacagccgcggcccctgggagagagctgcagccagctctccaggcgctttacgagcccttcttgttattacctcctatttctttttatgctactgccaaaataccaccattaatctttcgcactccctgaaggcaaaacacgggtaattggatttatctggttttagaatttgttaggttctgttgcaaaataaataaataactgacctcgaaagagagggtcgtcttctgggcccgtgctgtcatgtcacggcctggccggcgggagcccacctggcgtctcctgagctcattaatctcggctatctcctccccacaccttgtccctcctgtcttccagccagtcccttcctgcactcggcttgatttaagaagttttccttgcctgaccccctcagctccagtgcttcccgctgcgtctgattctccctgcagtcttctactccccgccacatgctggccttgcttcatcacttttttctttttccatctccttctaccatggctgttttctttcctgatagtactgtgtgaggttgtttaaaacttcctttcgacagcctggaaccctcgtgtttgtcaccttgtttccctcagcttttttgtttttcttaagacacagattgctgcagacatcatgggtgatcatggaagacaagttcgcctccctgtttggcttttgatcacggtaaggccacgacgcagtgaatgcaatggacgtgcgttctttggttgtccctttattgcacgtgtgttaaatccagtagaaacacccacagtgggcccttccaggccatgctcatccttctctaagaattctgaccacctccacctccatggcccccagccatagcacaatgtgtggggactacatttgtggcatggggcttgtggacattactatttgccagcccaactgcaatttctcactaataacttgctgacagatccttcatccaagtatgggtaggagggagggaatgccagaaaccctctttccaggaccctagctcctccagctagagcctggacataaatgggatcctagccaatgatcccacagggaaccctgctcagagagaaattctggagaaatttttttataagacacccacaaacccttaatgactacatttggactttgttgtatgagaaggtgatgtctggggctgctgcagtcatcttgtagccataaaaggtgctgatgtcagcactttagctgatggaaaccattcctggaactgcctcgctctagcaccttattgaggccctccattgagtgagactataaattttaccttttttttttgagacagagtctcgctctatcacccaggctggagtgcagtggcatgatctcggctcactgcaaccttcgcctcgcaggttcaagcgattctcctgcctcagcctcctgagtagctgggattacaggcacctgccactgcgcccggctaatttttgtatttttagtagagacggggtttcaccatgttggccaggctggtctcgaactcctgacctcgtgatccacccgcctcggcctcccaaagtgctggaattatagatgtgagccactacccccggccaattttaccattttttacatatctttaatgttacattttattatttggtgttaagagcatcctatctgaggcatgacttttgcccctaagcatggcttgattggatcaggagtagaccctcgacccaagctgagacaatctgattttatctcccagaaatttggaaatgagacagagaaatactggacaatctgtggagactcgcttgaacgagaactatgaagccaaaagaggtcggatgggcaccttccaccctgtgcaaacagagaaagccacaggagcaaaagcagcacgtgtgcgggaagacggagcaccgagaccaggagaccccgaggaaagaggagggcggcagagtggctgcctctgttctgagaagggtctgactcctgcttcccttcctttcagaagccaaaattcttcactctcctgcattccatggtccttataacacagcctacctctttatttaaacagcttgagtggagtttttggtacattttaacaaaaagagtaaagcaaaaaattgttgtactcacaacttgagatacagaggtgaactaaatattttccctcccaggaacgaagtcctgtgaagggaagacacagcgggagaggctgcacacagtggctcacgtctgtaatcccagcacttcgggaggctgaggtggaaggatctcttgagctcagtttgagaccagtctagcaacgcagggagaccacatctctacacgtttttgttttttgtttttttttaaattagccaggtgtggtggtgcatgccagctcctccaaaggctgaggtgggagggtcgcttgagcctgggaagtcaaggctgtattgggccacgattgcaccactgcactccagcctgggtgacagagtgagactccgtctcagaaaaaaataaataaataaataataataataataataatatggccggataacctgcaagattatgttacagttaacagtatatacattccgggggtatgagaagagaactagttcattccccctgcatgctctggtaaacagaaaacactaaaaaggtcagacacatttttttccaaaaaatagtgcaccaaactagttttccttgtatgagaaccagactcatggatttgtacctaagcattcctgattctgtatatctgagactgggtacgggaatctgtattctaaaaaatcttcctggattactatgacgcccagccgggcttggaaggcctataaaccattgagacaaaggtgacaggaaaatcagaaaatattaacaaattggaagtagcatttgagagagatctgaaagatgagtaagacctgtcatatatagaaagaggttgggaaataacttttcaggaagaaagagcaaattgcaaattaccacacaaataaaagttgcttatgttcactattatttccatttttgttatggtcacaaatatatacatgtctgattgcacctacttacacagctgggaagaagatagggctaacaatagattcaatctacctgcctctgtcaaacagacattattaacatgccctgcgaagtatcacagaagttacttgaatttttttttttttttttttttttttgagacagagtctcactcttgttgcccaggctggagtgcaatggagcaatatcggctcaccgcaacccccgcctcccaggttcaagcaattctccttcctcagcctcccgactagctaggagtacaggcttgtgtcactacgcccagctaattttgtatctttaggagagatggagtttctccatgttggtcaggctggtctcaaactcctgacctcaggtgatccgcccgcctcggcctcccaaagtgctgagattacaggtgtgagccactgcgcccagcccctaattaaatcgaaatcttgttcctgccctcaagaaactaacatcaactgaggaaaaaaaactatgtgtgtgtgtgtgtgtgtgtgtatgtgaagagggacagagagaaaagaggaagtaaaaataaataaataatctgattactaaagagtcagctacacctgtaaatgcttgggggatggaggatggagtggggtgcggcattatcagaactagcttaagttaatcatctcctcctcctcctcttctttttcttgaaatggggtctaggtctctgttgttgctcagactggactcaaattcctgggctcaaatgatactccctgcctcagccttctaaattgtttggaatacaggtgtataccactgcaccaagcttgaagaacttttaacatttcttgcaaagcaagtctattgaagacaaatctgatcaatttttgtttgtctgagaaagtctttatctatgttgatgattcttttcttgcaatgctttaaatatttcaccctgctcttttcttgcttgcttggtttctaaagagaaattcaatataattcttatccttactcttctataaacaaggtgtttttccccgctagtatcttccaaataattctctttgcatttgacattcttcagtttgaaaatcatatgcctaagcataggctgttatgtttgtgtgttcgtttgtttgccattatcctgctcaatgttctctgagcattcctggatctgtggtttggtgtccggcattaatcttgggatattctcagtcactatttctatacatatctcctctgtttctttctctcttgcttttgtttctgatatctcattacacatacgttgcatcttctgttatgatcccacagttcttagattttctgttctgttttcttaagtctttctctttgcttttcagtttcaaaggtttccactggcatattttccagctcactgattctctcctcagttgtgtccagtccaccaaagagctcatcaaatgagcccattcttcatttctgtaacagtattttctttccagcattccttttgattctttcttagaatttccatctctctgcttacattactcatcacttcttgcatgttgtccattttttcccaatattcctttagcacactgagcacagtaatttcaaactgccagtgtgatagctcaaacatccctgccatatctgagtcttatgctgatgttttctctgtctcttcgaactctgttttttggcttttagctagtgtggggtaaagtagggtatttcccatcctgcagtgggataggttctggtttaaacaaaaaacaatgtaattaggctgtgggaaaatagtttctttcaagaataagcttttgttaagaagaacagaatcctctgggaatgtttccaaatggttaccctgctgtacctacgccttttcaccctgagaacctggtggggcttctggaggtaaaacccacgaaagtatggggactccgcaaggacttattcaaaagttttacatttcaagttagtctacatctagttttcagccatcactcaatggtctttttaaagatcctagaagactctgactccaggggtagtttctgggtggtttctgcccaaaataaacagtgaatctctgtatctacctgtctctagtttttaaggtagtggccttatcctatgacttcaattctctgacggatctgagaagaattgttgattttcagtgtgttgagggttttttcttgttgtgaggatggagagccagcccccaagctccttacatgtcagaccagaaggtagaagtctctgtccatgactctgttattccctaccactcattctcttgcttattctggcccagtctctcctttctgttgctagaacacagtgagcacacatttgccatgaaccctattcccttgccatccctgtccctggaacacttccagtaggtgtttgcatagctcacttttgcactttgatcaggtttctgctcaaatgtcaccatcatcagacacgtggttcctgaccaccatggcaagaatagagacccttgtccctctcaactaatttaccctactcttttattcttcagagcactcatcactgtgtaacatgatattgtgtttagatgcatttaccttgtttattacctgtctttccaccctagattgtaactctaaagatgtcagaggcatgttctgtattgatctctgtgatgacgacctcagagtccagaaaccaaaagcagcttggatctcaggcaaggggaggctgtggtacgcatcaagacagcataccttctgcaagagattacttgcagagaaaaataaaagaacatttaaggcccctgagaagaaactgtagtgagactctttgagaaattgagacatttaaaaatagccatgtgtatacaggaatggaaaaaaaggatgcacacaagaccaggagaggcatataccaagaaaaggcctaagaacttaagccatcacatcctgctgattagtgaaggtcttcccttgcatggaggcagcttacaaagacttgaagaggtggttgttttttcaaatgccaaattttcaacataatgtcactaggcatacaaagaaacagtaaaatatgccccattcaaaggaaaaaaaaaatctccataagattttccggaagaaacatagacttaaaacttacctgaaaagactttataaaaactgccttacatatgctcagagagctaaagaaaaacataagaaataataaaaagtaatcatgaaaacaatatatgaataaaattagactatgaaaaaagggatgaaataatagaaaaagaataagaaaacaaccaaaaacaaattctagagctgaaaaatacatcagatttgaacaagcagaaaaaacaatcagtgaacttgaagacatatcatttgaaattactgagtctgaagattaaagaaagaagaaatgggaataaagcctaagggacttaagaaacaccacaaagtagaccaatatatgcattatgagagttccgggaaaagaaatagagagaaaggaaaagagtttatttgaatatgtaactactggaaatgttccaaagttgaagaaagaaatggacatatacatataagaagctcaatgaactttaagtaggataaacccaaggatacccacagtgagatacattataaaaaaatgtcaaagaccaaagagaaattgagaatcttgaaagtagcaagaaactaatttatcatttacaaaagattctcaacaagatcatcattgaatttctcagcagaaatcttgcctcccagaaggcggtggattttatacttaatgtgctaaaaggaaaaagcaaaagcaaaatcaaacaaacaaacaaatctgtcacccaataaatccatatccagcaaaactgtctttcaaaaataagagagaagttaagacatccccatataaacaaaagctgagggaattcattaccactagacctgcacttcaagaaatatgaaagagagtccttcaagttgaaacaaaagaaagctggaaagtaatttaaatttgtatgaaaatataaagttctctggtaaatataatatatggacacctaccaaaaaacctgtattattgtcattttagtttataactccaattttattctttcataggatttaaaatataaaactatacataataataaatctatgttcatgggtacacaatgtataaaccaataatttgtgacatcagtaacatatagggggatccaagctgtccaggagtagagtttttgtatgtaatttaagttgttatcaatttaaaatagtttttctaaccttaggatattgtatataagccctatgtgcaaatcatggggatatagcataaagaaaatacctatagaatatacacaaaatagaatgagaattaatcaaaatgcaagcctaccaaaaactaaaataaacacaaacgaaggcagtaaaggaggaaatgagggacaaaaaaactataaagtgtacagaaaaaatatataacaaaacagcatagtaagtcagtgattactttatcagtgattactttaaatgtaaatggattaaacggcacaatctaaaaacacagattggcagaatggattaaaaaacagcatccaactatatgctgtgtccaagagacccagtttagatttaaatgcacacatagttcaaaagtgaaaggttgaaaaagtatttgctatacaaatagtaaacaaaagagaccagaggtggctatgggatagcacacaaaatagactttaagtcaaaactctcacaaaaaacacatgatgttatataataataaagaggccaatttaccaacaagatacaaaaaaataaacatatatactaaatagcagaacatctgaatatatgaaactaagtttgacagaattgaatagagaaattgctctacaagaccagtaggagacattagcactccactttcaataatagatataacaaacagacataagatcaataaggaaataaagagcttgaacaacactacagaccaattagacgtaacagaaatgtacagaacactccacccagcaaaggcagaaaacacatttttctcaagtggacataaaacattcttcaggatagatcatatgttaaggcaaaatataagtattagtaaatttaaaaagacagaaatcatactaagtatctattcttattagaatgaaataaaactggaaaacaacagcataaggaaaactggaaaatctacaaatatgtgtgaattaacacattctcaaacaatcaatgaataaaaaaacaatttttataacaatcttgtgacaaatgaaaatgaagacacaacataccaaaagttataggatgcaatagaagcagtattaggatagaaattcatagcactaaacacttacaacaaaaaagaaaaaaaaacactcaacaatctaattttaagccttaaggaactaaaaaaaagaagaacaaactaaacacaaaactagcagaagaaagaaaataataaatattataggagagataaacaaaatagagaatgggaaaatagaaaaaaatcaacaaaataatgagttttttccttaaaatgataacaaaatgggcaaaactttagctagattgactaagaaaaaaataaaattcaaataactaaaatcacaaaaaggtcatggtataactaaatttatagaaataaaatggattataaaagagtactgtgaacaagtatgtgccaacaaattggttaacctagataaaatggccaaatttctagaaagacagagtctgtcaagactgaatcacaaagaaattgaaaatctgaacctcccaaaaaagaaaagcccatgaccagatagcatcactgctgaattttatcaaacatttataggagaattaacagttttcctatgactctcccaaaaaattcaagaggagagaacacttccaaactcactctataagccaatattatttcgataacaaaatcagacgaagacattaccaaaacaacaacaacaacaacaaaaccaatactagtctaatgtgccttgtaaatattaatgcaaaaatctttcacaaaatgtcagcaaagtgaattcaaagcatattaaaagaattatactcataaccaagtgagatttatttctgcaatgcaaggatggttcatcaatgaatataccacattaaccagttgaaggaaaaaacaaaacaacacatgaccatctgaattgatacagaaaatgcatttgacaaaatgtaacaccctttaataataaaaaatactcaataaactaggaatagaaagaaattacataaccttaataaaggtcatatgtaaaaattccactactaaaatgtactcaacatactaaatgagaaaagatggaaagtttttcttctaagattagaaccaaggcaggagtgtctgcttctatcacttctactcaatatagcactgggcattctacctgaagcaataaagaaaaagacgggctgggtgcagtggcccacacctataatcccagtactatgggatcccaaagcaggcagatagcttgagcccaggagtttgagaccagtctatagaacatggcaaaactctgtctctacaaaaaatacaaaaattagcctgacgtggtggcctgcaactgtggtcccagttacttgagaggatgaggtgggagaatcacgtgaacctgaaaggtcgaggctacagtgagccatgattgtgtcactacactccagcctgtgtgacagggtgagacagtgtggcaccctgtctcaaaaaataaaaataaagatgataaaagcatcaaaaaaggaaaggaagaagtaaaactatctctgttcacagatgatataatcttatgtgtagaaaactctgaagattccataaacatgcacaaaaattagaactaataaattacattgtagaatacaaaaatcaacaaaaaaatcaattgcatttctataaactaacaataaacaatctgaaaacataaaaaaaattttatttccaatagcatcaagaagaataaaatacttaggaataaatttaactaagaaggtgaaagtcgtatgtacactgaaacatcaaaacattgttgaaataaagaacacaaaaataagtgaaaagacatgttgtgtttatgaattggtagacttaatatagttaattcaatccaaagcaatctacccatgccattgaaatagaaaaatcaatcctaaaatttatatgaaatctcaagagactggaaatagccaaaacaatcttgaaaaatataaacaaagttagtggtctggaacttcctggcttccaaaacatactacaaagttactgtaatcaaaattgtgtggtcctggcataacaacagacatacagaccaatggaatgaaatacagagcccagaaataagcccttgaatacatgctcaaattacttttaacaaggataccaagaccattcagtggggagaggacagtcttttcaacaaatggtgttgaaaaaactggatattgacatacaaaagaatgaagttggactcatattacaccatatacaaaaaaaaaaccctcaaaatggatcacaggcttaaacataagagctaaaactattaaaaaaaattttaagataggaaaaaagcttcatgagatcggatttgttggtgccttcttagatctgataccaaaagcacagacgacaaaaggaaaaaacaagaaaagataaattggactacagtaaaacgttaaagccttcttcatcaaaagacactatcaaaagagtaataaggcaatccacagaatgggagggaatatttgtgagtcatatatctgataagggtcaatatccagaatatataaaactacaaacgttgaaaaacaaagaaacaatccagtttaaaaatgggcaatcaacttgaatagacatttctccaaagaaggatatacaaatggtcaataagcatatcaacatcactaatcattagggaaatgcaaatcaaaatcacagtgagatgccacttctcagccattaaagtcactattaatgaaaataatagaaacagaaaataagtgttggcaagaaggtggtgaagttggaactcttctgtattgctggtgagaatataaaatgactctaccactatgaaaactgcgtggcgtttcctcaaaaaaattaaacatacaattaccatgcaatccagaattgaaagctgggattcaaacagatatttgtacacctaggttcatagcagcattattcacaagagtgaatgcaatccaagcatcaatcaaaggatgaatgaataaacaaacgtggcctatacatgcaatagaacacagccttaagaaggaaagaaattctgacccatgctacagcatggatgaaccttaaagacaatatgtatagataacttaagtaagctagttacaaaaggatgaatgctataaaataccaattatctgaggtacctagtgtggtcaaaacatagagacagaaagaaaagtagtacaatagaatagtaataatagtaatagaatagtagtttccagaagctggggggagggaagaatggggagttattgtttaatggattctgagtttcagtttgggaagaagaaataagttctggagagggatggtggtgacagttgcacagcaacgtgaatgtacttaatgccaccgaactgtatatttaaaattggtttacatgatacattctacgtatttttaccacaataaaaacaggggcatggaggaactttttggggtaacaaaaatgttttgtacctagtgaggtggtggctacatgggtaaatatatgcgtccaagtatactgatgtgaaccctaacagggtgcgttttactttaagcagatttcgtttctccctctttttatccctctctcttcctccatccccctttcccattttgtgggctctatgttctgccaacatagtcacatattcaacatacatggatgctcagagaggagagtctagaattaatttaactgtgtaattcccacactgcctagaatagtgctggtgggtacccaataaatgctgcatggataaattgtgaattcagttatatatatattatatatatatatatatatatacaaatgctgcatggataaatatatatatttaacttaatagcaactgtttattgtgctcttgctgcaatgtaaaactttaatctgaaatctttacaaacttggtatcatttactgcctcccatcagcccagtgaagtggatatctattccttatttttttttaatcaggaaattgaggcttagaaaaattgagtcacttgtccaaccacatacagccattaagtaccagagttgggattcaaaatgagccttttgactgtaaagtcagtgttcttaacctcttgatagaggttatactttatcttacatttcactaagcacccattgactcgcccatcataaagcagagcatataatcaaggacattctatgaactgtttccactgcacaggtacagcgggaggcatgttgctgataggtattcagggacctcatagtgagatcttgtgacagaagcagctgcattttaggacccaaggagatgggtccatgaatcccttcatcctgagatggaatgtttagagatgactcacattggcttttccaaaccctgaaatttgcaggtattcttccagaatgtgccagcctctattatgtgaccttgatgaaggggagaaagcagacattcctcccttgcaaatcgttcagaatctcctgcctgtggcttcaatgatattgtgcaattgtcaaatcctccaattataacaagcaggcagagaaaggacaagtgaaacagcaactatttagggagatattagtatctcaactagggttcaaatgccaggccctatggttgtaatttcagtgacttgtgaattattcaacatggatgagaatatcttcattagaaaagggagatgtgtgtgtgtgcgtgtgtgtgagaaagagagagaagaaacagagagagagacagagagatagagataaaggagaaacattcatcttttcagaaaacttagagcacctactaagcattaggtattctgttggacactgagaatgcaagatagatagaagatattaatgcatttaacaaagggcttgggagaagcaataaaaatgacaattggaagaggaatatctttagagatggcagagaaaagcacacggcggtacaaatttgagttctgtaattcctcccccctcttacacagggtgccttacagacaatatctcagtgtaagcccagcctctctaataaacccctgactcattcaattccctgggtgtacagatggtgactcctttttttctccatcacaggaggttccaaacaatgaccaggaggcaacagtggatagtcaaggtggaccaataactgagacacaggctatgtgcctgaaaataaatggtttaattacacataagcagggtagacaggagcaagcgtcacttggcctagacctcccctgctgcctggatgtgaagtgctctccaaaagatcctttgggtaaataggcagatggtaagcattggaaagtcctggaaccactaggccagtcagagcggggttaagggcaggcctcgaccctcagagaagagatcctggcaggacaaggcagggtacccagtcacccagggcctggggtaggtccagcgtggattagcaatacagggactaagacccattgacaagagggagatttacagctgtaaggcaggtaggaaccgaggttcagaacacgctggaacctagcagcaagtgagaactgaccctttgactgttctcgccttgacttagaatgggtgctggacatcaggttatgtgtggtcctgtggcctggacaggcagagaagaggctctcaaatcccagaaactcaaaagtagggcccaggcattcttatctgccaactttctttcttttctctacctctgactattcagtaattccacttgaggtttttgttgttgctgttgctgtttttctcacaggtacacactgtccccttctttagctcctttctttccttcctttcaacttctacttctggaatatctctctgctactctctcctttcatgagtaattccattattgtcttttctgtcctttatctatcttccttcctttgttaatatttatgaaaatttcctcatccatcagagtagtgacaaatgcatacaggaatcaaataatacaaaagcggctgggtgcagaggctcacacctgtaatcctagcactttgggaggccgggatggggggaacacctgtggtagggagttcgagaccagcctgaccaacatagagaaaccccttctgtactaaaaatacaaaataacccgggcatggtgatgcatgcctataatcccagctactcaggaggctgaggcaggagaatcgcttgaacccaggaggtggaggttgcggtgagccaagatcgcaccattgcactccagcctgggtaacaagaacaaaattccatctcagaaaaaaaaaaaaaaagctacatattttaaaattaaatttggctcaatagaaacaatacaacaaactccaaaacttcagagagcattcagaaatatctttgagaaaatgtttccatattatcttcttctaattacgcctacttttcttcagcattggcattcacaataaatagaaaattatcgtattcttttttctctcttttgcgtaattacttctgcaacaacgttgttttctgttattcttcattgctggtgtatagcattttgggtaattgtgagttgaattgtcttctgtggactagccagaaaacttaacaaccactgataacattctttatgatgattatgcagtggaaacttgattaattgagatgccataaatcttcagatccactgaaaatgtttaatattcaaaaccaatttctaaaaattgtattgatcagcactttcatgggaagccaggtcaagaccttcagcatctctttgatttaagtattatgtatctccagggaccagcaagtcaaagcgagtcacatggttttctctggggtatgaatgcatggcaaggcctgcgctctctgtgttcacagtcttaaattaaaatgtgaatacaaggatgggagggaggataatggagtgacgtattttagggtttaaacaaaattacttctcctccttctatactttggtatcactcatttcttcacaggtctcattgttgggttcttaccaagaagtgaccggctcacgttgtcttaggttgcaggccctttgaggttccatatgtgctatgggaggtcaagtaacgggatagtacaacatttagggcaggttcaaagccatgagcatccatgatccccctggacagtatgttagatcctggtgggtgtcatgttgctcagtgtttgcagcgtgcaccatttccagcctcagaaggtagtaatagatgggcttcacttgagtgcgggtgaggggagggaagcccccaagaagcaaggagactctaaagatgggacagcagacagctgcagccttcaactgaaatgcagatttcctgaccttcaggaacagaaaggatgtgtttggtttatttctgcttgtggcacttggaagttttctctgtcctctacatctggggagggggacatactatgaatttgaaaagaagcataaaggtcttctaggagcaaatgcagactctgacacatgataaccatgtgaccaaaggtaagtggtttaacttttctaaacctggacccgtaggctgttaatagggattgtaatggtctgaaaattacatgacatgttaggtaattaatgtggcatctgacacatagtaaaccatgtacaataggagcttttgtttgtttcactagcatcggcatgtccccgccccacaacctcccctcacccctgggctcttgcaggttttgttcaaggctctgcagtattatcctgtagtggcgctaggtacagacagttcctttctctaaacttctctaccgggaaagccatacacagatctaggctaggcagtgctgagcagcctagatatcacagcttcaatgttcatttcttaaaagaaaatacaccaggtataaaaagcatcaagtaggtagtgtcatttattgggagacaacaagggcctgagaacggatcaagatgaaaagagtgcacccctcccccaaacccatttcatgcaaacttgagctccaattatacctaacatgagcaagagcggcttcattcagggcaaacaataaacaaacagacctgaaataatttggtgctgtcttgtatatgttaaaaaaaaggaagaaagaaaatgaagaaaagttagcacttggtttctaacttattaggcaatgcaaatttctgtcagccctaaagatatcttggactgtaattccctcttctcatctcatgactgaagacagcttcccgttaataataagtaattttaaaagacctcccctgggaaggtcaaatgagacctgcttgactcttcccctccactgcatcttgctgccggatcccatcagatccataaaaactgcctggcggaccggctccccagctccctcagagccagccacctagtgagcacagtgagtgggccaagggcagagtccttttttagaaaccagaaggaaaggaaatgagaaagacagacctaaaccaagcccaagggccaaatttacttaaaaaggttaaacaattacccaaagggcttagataagagctgctgagttttccagaaaggttcagaaagccagggaacatatatttctaatgctttaaaacgtcttctcccacagcctgcttcaaacagggggacagagagagagagagagagtgtgtgtgtatgtgtgtctgtgtggtgtgtggtgtgtgtggtgtgtgtgtgtggagtgtgtgtgtgtcgtgtgtgtgtggtgtgtgtggcgtgtgtggggtgtgtgtgtgtgtgtgtgtgtgtgtgtgtgtgtgtgtgtgctggggaggcagacacattcccaccaatcagggatgtcagagagtgtcacggactcaagccagccttgctctcccaggcctgccagatccggcagccatgacccaacccaggacatgccaacattcttgctgcctccctgcattgtgtatctccttgggcccacaaggcaaatctctgcagagacaggtatgctttccaaatgtgctcctctactgcttctaaaaagcactagtactactgctcttcactctgccactctgcttgttttcttgacctcagggatagtgaagactttgcatagtttggatcagactgccatcattggtggattcaactgtcccctctggcaagtgatttgagtggaatccaaaagtccctcaggcctccaagaccgctaaccaactgctgtgcctgaatatcccaggatcatattttgaagacaataaaattgtttagatataagggtttcattgctgtagaggcaataatacactagaagtggttgtttcccattaagatggattaaagcattaaaccaatacttatttgttgtaatctttagtatccaccacagtatctatagtcaacacataaagcacagctcctaagctccaggagcccccagactaaccataaccacacatgaaaaaataacaggtcctagtgtggatctgttagaacagtgttagcagcaagagttactggaactctcatgagggcaattcttgacaagcagaaagaattctgggtggaactgtgaaaaaacaaatatactttaaagctgtgtataagtgtggggatagaggaagaacgagatggagcagacaaaactgaaaaaaatgtgtgagtattgtcagttgttattgaggagttcaacttagtaccagtaataacttgcacacatatgttgctttatggctcacagaacaacccatatacttcctttcctctgataatgcagaccagttataatagatattgttcctgtatgtacacaattcaactgaaagtgctcaaggccgtggagttagtgagaggtagagtaagaatcaaccccaggtgcctaggcccccagacacagagctttctagggcattaacattgcccatgaggtgcaggcacccatggggaagatgcttccttggaaagcagggacgctggataagccttgctcagaggctctagggccagaaagggctttagagcagtgttctcaatcctggctccacattagaaatactggaaaagatgttttcaatggccacgtccatccccaaacccaggaattttgacatcatcaatctgggagactggaaatggaatttctaaaaagcatcccagataactccaaccaggttagtgccaccactggagaggtcctttatggacctgtccctgcttgagtgtcttttaatgtctttgtcttcccagactaggagtaaagtctttgcatttacccagttcttattcagcttggacaactgaaacactgaaatggaaaaataatgcatttgttttgaatagtctaatggctactcaaaatcttttaatttacataagaaggagctgaaggtaggtgcaaagtacagaaacacacccaggcaaacaacagaactttagctttggaaactctactgcccaggttgctttggcaaaatccccactgctcagattattccttggcagtagttaaacctcaaatacttggttttgaatggattagctcagaactccaaatgaaaatgcagggacattttagaaaagagccattaagcataatcccagatcagcaagcctggatcaacaaaactgattatcctgctgttgaaataaaaaacacaaaacaccaaaacaaaagcaaaccagaaagaaaatccagtatgttggtgggaacttttcccgttgagtggaacagttacaaccaccaccttgcctccatctcaccgcagcccctcaaaatgttcatgtacacagatgatgtggacccacagaagaactcaagcaaactttgaggagattgaggcctgtgaagaaagcacaactggccatcatccattctgctgagatggcttaatagacaccagctgaccacactgaacatcctgggctcctttcctgatgtgggcattgattcagacacatgacttctggattcttgtcatatctaatctaatgcagagccacagaacattttcaacccaacagcagataattgtaatgaagtgattctggccaagagggcccatttgtaataatgaattcaaatcagattcatggaagctataattcaaccatagtgaagagcaccttcattttccatatcatctctcttccaagagggcaaaataactcaatattcaaataattatttttgcttttcaagtaaccctatgaagtagttatgaggaggataatattgcctcacttacagaaaacgagtttcatccacgttcaaagcttcagtgtcttctttggcacagcacttcctaatgtccctcagagcaatcaaagacctgtcacaacaaaactgatatcccaaaggaggaaaatcactcttctctgagctgtgcagtttttcactgggaaagtgaaaggcaggcccaggtttcgtgactcctttgcttttcctagtaggtctctggcctccttatgggacttcattcaagatttagaaacagattcgagatagtttgacccaggacaaccacattaaaagagctttcgtgtgatgggcatgggtatcattcagtgttttttggtgcaatctaaacatgtgatgcgcttggaacactcagttcccaggtaatgaatccctaatgaatgtctttaaggaggcaaaagagtaagaaaccacacttaagaattacagcttatacagcaaaaaacaccaccaaataaaacatggtatatttatctggggttgaagccatgggcttctagaaactgaaaacatggactctccctcagagtactgacaaatcagttgtttgttaagatgggaacagaactcttcaccaatacagcaaaagagtgaaaacaaaaggagagagatggggacacacagaaatttgcagaagatgtttattttcttttaggaaacactgtggtagcagtgaaatcaaaaccttaaaaaatcaaggaataagaagacttaagtgataaagacaaaaaagaaagaaaataatgagtaatagacgaaagtatacattatgggagcatctgataaaaatgaaggaagaaaataataaaagagaagatgacatgagctaagagaatgaggatttaaagagattaaaatgtagataacgtgctgaatttccctattctggggtaaatgtatagaagagacgcaaaatcaacatgatacatgtgcttacttaaaaaaaaaaaattacgccatgcaatcagataacagataacagttatgctagaacatgtaagttgttctttttttctgcaaagaacaaaaagcaactattcagcttttctttttttattcccattcccattcccaagcccagctgctcaacattagaattgaagatcatgaaaacaggccaacagctaataaaaaattggtagatggaagctggccctctgctggtggaatagtcttactgcatctcagaaagcagaaagctcaagttttgaagtttctggtttaattttgagggacaggaagaggacagaggattctggaaaattcacgactgagatcctattcaatgctagacctctttgcccccagtggcacattagatggtaaagaggtgtgtggcagcatcaacatccctgaacactggtaatatttactgacattttcttggttaacatgtattataacccgtgtgctgcttatatctttaagccaactagctcactgcaaatgcgtattgggaaatgttccctgattcctcatgggaccttctttgaagcaatgaagtagggatattacattctagtctggggcaggctgagtggtacccacatggccaggaggacttttccttcacatctccaggaagggcctctctattctccttttttctccatttgctttgggcttctgagaaacagcacacaggattctgggacctgttctctaactaaaaagaagatccagctaagtatcacccaaagtggcagaatccaatcttcacccttgggcttagaaaaagaattctggtgtcccagagacaggtctttcctcctccagggagaggcttgtctagatgcaggaaaggttccaccagaaaagccaagggaggaacaggaagaacccccaccgtcacactgtcctaggggaagccaggcattttggctgcagaatctgggtcaggatgttttattgtcaccataaccatcaaagtcataggcagggcaaatgcattcgccctgtgtacattgtgagacatagttaagctgggacgtccctgaatctgtctcctaggaccagaactgcctcattaaagggataaaagatgatatctgctgagctggtggaaagtggtggctgcatttttattaaagtatctgctgcagcaagtccagtccccaaaggttcatattccaagattctccacctctctgcctggagcatgcaagtgattctctgtaactcattaaggtaaaacaaaaagctctcctattgtgcttttcacacagaagtgatgttgttgcataaaagctacatgtttcctttccttggacccagtctgcaaaaataaaactgctgtcataatttacaatagggaccctaggagcactacaccaggtttggcacgagtgctgggtcttgaggagactcataacaggccgtgggctgacactggtaattccacagcctcacatttgaggtgcatctctgataagggctagcctggtggtcctgaggacgatcctgcctcatcatgtaccttctggcctgtgacagccatccaaggggctcaggctagccccccagtgtttcaaacccatgcactcatgttctcatcacggtgcccaagcaggagagaatctagcctgtcgtggcttcaaagaaccatggagtcccacacgtggacttcaaggttcacgcataagatcctggaccagcatagccggagcacaggacaaacctgtccaggggcacggcagtcggcacggcagcacgcaagcgggcgcccctcgggcctgcacaaggcccactcgcgttccggtcccccatggagccttctgccccctcttccctcctctccccagcgaccacagcccaggggctcggcccccgcggaaggacagctccctacctgagggtggcgctctccccctgccggaccgtcacgttgtccatagctttggggaaggtggcatctccgctgcgcacgggcactcctgtgggtacaaggaacagcagcctgagagacacgaccacgaggcacttccagggcaggaacaggtacccacagacccccattctcgacagccacaacttcccaggactccggcagccgcacagtcctggtcccccgccccgcgcaccagcgggctcgggaagcggtgcggggaggagggaaggggcagagttcgccaggagcagggggaaggagaagagaggagtccgggctctccggagtctgagaattcttcctcagatcctgcctcagctttccagcctagcagaaccagatgccccctcctgcatccaaaaagagctttcttgacgctcccctggggaggagggaggcggccaggaggggagaggaagaagcaaggtgcggggatgaaggtcacagattgcgctttctctgcctctctcttcgagacgctactttaagattcagttgggcacgttctgcagagctctggcatcaaaagtttataacccaaagaagaaggcaagtgtctctgacatacaggagctgtcataaaaagctgcggcttcaaggagaggaggaaatggtttattagatcacacacatggacagatgtacgtgtcccccagccccaggtctcgcatctggaaccccaaggcggcaaaaagttccaaggcggggacgcgcagccggcgcagccagggtcgtccggtcggtggccgtcctctgcagcccggtcggcgactcgcggccagccgggggagcgccgcccggcgcaggctccgggcgcacggggagctgggcggacggcggcccccgcctcctccggggacgcggcacgagacgcggggacgcgcggacgccacgctcagcggccgcccccggcctccgcgccgccttcctcccgggagcagccccgacgcgcgcgggcccggaccgccggggttgtcatggcagcagctccatccctgaccgccactttctcccggtgccgcctcggagcgagcgggctggcgggcggcgcggactgcgcgctcatcccgacgggcgggcgcccaccttaacctccgccgcgcccaccgggctggggatgcctgcggggatgagcccgcaccgcgcccacttcgctccgtcccgacacccgcgccagcggagagaacgcggcgcccctcgcagcggcttcccctacagaggggcggggtggggggagcggggagggagaggggagggcgggagagggagttctggggaaagcagcaaactgaaaactgacactggcaccttccctcgccgatgccagcgcagaagttgacaaaccccgccctggagagctgaactaccctgcccacgccagatggggcaccggtgtgcgtgtccatcgcgctgcgaacggctccccgcccagccaagtccagccctgacggcgcgctgtcctgggcccgcgcagaggtggagtgcacccacctccgaggacccacctcggaaacgcccgtgcccctccactggacgcctgtccccaaagtggcaaatctcaatttctccttaaaacacagcatgcaacattgtccctgtcctacaccttatcgtggtaaaaagcaagggctgggaaaaacacaccagatcctaaaaagtagtaggactgatcctcctaaaacccctcacaggaagcggcgccgcagtggtgctgggaggtgactggggtgcttttggaagccagcctccccctttctttggtctcggatttgtctctttctgctctaaaccccagagctccgcttcccttgggcccctcgggaggccctctccgctcccctggcagaagcctccccgttgtattctaatttaatggttgctatgtgcatctgctctactgtattttctctcagagccttttgttaaattagactgggctctgcacaattggcaaaatgaaatttaattcaaaaataagcattaagctcttatcgtttattactttagttgctgaaggatacaaaggcatactacttgctttcagttctgagagaaggagcacaaataaatactgccccattccccattctaaaagggttagcccacatatatgtgtaggtctaaaatttttaattagagcatcttacctagaagggagaatacttatcactaattatatcagctatagtgaaacatatatagtcatatgctgcttatggagggggatacaatctgagaactgtctttaggagattttgtcattgtgtgactatcctagtgtgtacttccataaacctagatgacacagcctactacacacctaggctgtatggtagagcctattgctccttggctgcaagcctgtacagcatgctactgtactgaatactacaggcaattgtaacacaatagtaaggatttgtgtatctaaacacagaaaatgtgcaataaaaatatggtacaaaagattaaaaaatggtacatctgtacaggacatttgccgcagacggagcttgcagaactggaagttgctctgggtgagtcagtgagcgggtggggaatggaggcctaggacattactgcacaccaccgtagtcttcataaacactatataattaggctaccctaaatttatcaaaacatatttttctttcttcaataataactttagcctactgtaactttttaactttatacactttgaattattttaactttttgactgttgcatgataacattagcttaaaacacaaacacgttgtacagttgtacaaaaatatattcttatatccttattctaagcttttttccactcttttttgtttgtttgtttttgagacggagtctcgctctgtcacccaggctggagtgcagtggcgcaatctcggctcactgcaagctccacctcccgggttcacgccattctcctgcctcagcctcccaagtagctgggactacaggcgcccaccaccatgcccagctaactttttgtatttttagtagagacggggtttcaccgtgttagtcaggatggtttcgatctcctgatctcatgatccacccgcctcggcctcccaaagtgctgggattacaggtgtgagccactgcgcccggcctactttttaaattttgtttgctaaaaactaagacacaaatacacacattagcctaggcctacatggagtcaggatgatcagtatcagtgtcttctgcctccacatttcctcacactggaagagcttcaggagcaataacatgcacggagctgtcatctcctatgatggcaatgccttcttctaaatccctcctgaaggacctgcctgtggctgttttacaatcacctttttaaaataagtagcaggagcatactgtaaagataaaaagtatagtatagtaaacataaaaactagtaacatagtcgtttatattgttatcaagtattatgtactgtacatatttacatgtgctagactttcatgggaccggcagcatagtagggtttgtttacaccagcatcaccaccaacacctgagtaacactttgagctaagacattaagatggctacagtgtcactggaggatgagaagtttttagttccactgtaatcttttctataccactgtcatatatgcggcctgtcattgacagagcattgttacacagtgatccactgggttaggtcctttccagaaagcaggtatgacaaaggcagcagtggggtccaggtctcatccataagctcccgaggtacaaggctttggggagttgtgatgcagagaggagaggctgggggctcagggagcagccccacaacctattttgggatttcctactagctttcatgacacatgtcttttctcaagacttgagtgaacccgggtttcctgattgacattgtacttcaacctctcaactctgagttctagtctagtatcaccagacgggaaaggctctttttcatactttaatttgtgtaaagctgagaacctgaggccgggcttatgattttcttcagttgcagagtttggagcttgaacacaggtgggtggcagccgtggagttgggtcaggctgcccctcaaggctcgcagctctgccacttggttgtagggcattcagatcccttcctctctcctggacctgctggttctattgcttctcaagagacaaaaatggagcagttgctaaatcaactcataaaagattgcttgagacaggaagagttattaaggaaaaagagaaaggctaggacagcatgaggttcccgataggaaaagaatggctgaggcaagtaaagaagagcagcagagatgggcagaagcgaggtgtaaattttcttaacaatatataataagtcttgctcttgcaaagaaataaaccaagtatcccattttgttgcacagctggctcccctgaaataaggtatctggagtcctaaggaagagggcctgtgtctatttccttctgtaacagcatttcctagctcaatatttctgagtgaataaacgggctcaactcatgggctagcagatcagagaaatgactgcaaaggtctcatttaatgttaatctctgtgagcctacagttgtgtgggagagacttcattcctctgtaggacactgctgtggactagtctgtgcatttatagaatataaggctgagaccaaattgaaattagaaacagaaaatgagctgaggttcacaatgaacaaggactaagtagtttatgtcagaacttttctaggaaatgcttggctgagtatcatgacacggtggcccctagtgaaaccctcttagatatgtggaaacatatataaagacaaattaacatcatgactaagagtatcccttatcagaaatgcttgagaccagaagtgtttcagattttgaattattttaaattttggagtctttgcattatacctactgttgagtatcccaaatctggacatctcaaattcaatatgctccagtgagcatttcctttgagcaccatgtctgtcctcaaaaagtttcagcttttggatttgggatgctcaacctatactacttttgaagttatattgtctgttcagatgctgacttgtcatctctctagctgcctggctggtacccaggaatacctatcccacctatgttatagggtttgaggtttcttgaaatgtaccgggcatgttttaaaatcaaggctggtaagaagacagacacagagacgactgccttgaaagatgagtttattccttacagttcccaagaggaggggcacaccgtgccatgctggaccacatggggaggcaccagggttggtcaggaggcagaaggagtgagaggaaggcctagcacatggtctttattgtgatttccatgggaataaataggggaggcaaggtaggcaaacttcagcaagcttaggattgtaaagtttgaatatttctggcaggctctgtgttacggcagtgggggtggttctagtggttctgtacctggccctggggtgatctagggcaagggcaatattgatttggtgtgtgagcattagataaaagaaatgtgtggggtatgggttttggatggattggttttctcataaagggcaggctcacaggcaagttttttatcatctctaggaattagctagccctaggagggacagtctttccagaattagcaagacctaggatatcaaagcatcataaaatacagaacataaaaaccataattaatataagggacaattaatgacataatgcatgcaacatttcaccaaattacttggcacactggaaaatttaataatcatgaattatcgttatgtagccaaactcccattttcacatgataacgatttgtgacataaaaaaagatgggagtgaaaggttataaatgccctatgtacaaactagagattctactcagacctacagaagtctcgtttatgacaatttgtaacagaaaatgcaaagttgtatcccgattacagggctgtaatgatcacaagagagaccactggctagccagagaaaagtaattatgaacaagcttgagaataggaatccttgccagagggaactttctcaggtaggagaaagagctgcaaagaaggcaaagagttgtaaagaaccctagggatttccaggtcagtattcaggtgactctagcaacttgaaactgacaggtagtatctgcaacctggagaagatagaatgccccagagaagctacatgaaacgtaaggcgacccacctgggaaaaacacctgtaaaaagtctaatcacattattgcatttcaaactggcttaagtaagactgtaggcctataatattcctatgtatatgtggactgtgtctggtgatggaacgtagctcgtgacactgaagagatgcatcctgtaagaagcagctgaacaatggtgcacacaactcaggaacccacaattacggagaaagacaaaggggaggtgggccttgttgggcagcaacttctgttcagaacctaaactgagctgcctgctgagtactgctgctgctttgggtatggatggatacttccaaccagtatcctgggctgtgaaaactctcttgcttgtggcaggacattatctgccttatagtctttgacggatcagtctcacacagagggtgataaccaagactaacagtcaaagaaagaaaccaatttaaaaatgacaaaaaatgtaacacgatttttacttattcatttatgaatttatttactaattctgtaaatatgtatgacacacctattttatgttggacactgttctagggactgaagatgcagtcattaatgagatcagctttattacatgcttttctgcacgggtgtgtaagcagtgttgaaggagggggaaaaagaccataaaaagtaaacagatgcaaatatttagattgtgctacaagctatacattaagaaaaggtgtgatgatgttggaagagcgaaaaatcaaatagccaggggaagcctctctgaagagggagcatttgacctgagtcctgactgatcggctgagtgaaggttggagctgagcaaacaaacaccatagaggcatatggcagaggtagcccgctagccccagcagcagatgaaggtgcagccgcgctgggccttgaaggtcacagtaactgttttggaattggctctaagggcagtgcgataacgttggagacattgcagtggaaaagagacgggttgtgattgaaaagttttgcacatcactttgaccgctgtgtagaggactagattgcaggggtacagagtagaagcagagggcaagacaggagcagcagaggccagaaacgatggcaatgaagacagagaatgatggagaggtgaggggtgcattcctgaagaatagtagttaggacttcctgagattggggattgagaaaaagagagcgattgaggaagatttgggtaactagctgcattttacaactacctgtaatgaggatgatgccagaaggaatgggtttaaggaggcaggaattgaagaatgaataaagagttctgattaagttgtgaagctatcacctctatgagacagtcaaatggagacatcaggacgacagtgggagaaagatttgaagcttagcatggaggactgagggtgatgctactgtctcattgaaagcttgctttcctaattatcataaaaaatagtggtaaagctctgctgtgtgcatttttggaagggggcatattatccatggaaccctcaatctggatctagaggctcctctgcctttgttcataatttggaaataggtgccttcagccaaccccgtgagatgtaacctatttcactccatttagttgtctcttaatatatctcctctacttggtcacaactcatcttttgagagtagtctctaacattgtttggagatgaggccatgaagttatcactgtttttaagaaaacaggaaaacgctgctcactgaccctcaatgtgagtcgaaggacctgggtttaagacctcggcctgttttgacttccctgctgtgatcacctgctgtgatctaggtggactgtgtgcctgcgctctagagtgcagcagggaagactggagcaaacacagggcagtcgggcgtcagtccaagccccacctctgcagctcactctgtgggactttacacaagctccttacattcactcatcttacagctgccacctctgtaaatggagaccaccgtagcaatgaatctgtagagtacttgtgagtgtatgtctcagtcagctcaggctgccataacaaaatactgcagactaggtggcctcacaggaatcggttttctcacagtggcacagcctgcaagtctgagatcagggtgccagcgtgaacatgctccgacgagggctctctttctggcttgagacagctaccttctcgctctgtgctcacgtggggaagaaaactctctctgttcttagaaggccaccaattctaagggattagggccccatccttctgacccctttaactttaatcacctcctaaaagccctatctctaagtagagtcacattggtgctcagaatttcaacatacgaattttgggggccatgattcagccgacatcagtgttaagtgaaatactgcatgtaaaataattggcatcatgcctggcactccctaagtccataataaatgctagttattactgcctacagaaagaggcctaattccccattgtcacaagtttcttctctgaagtatctctgtgggcagataagctgtacagagcaagacacaaaaattcccaaggcgtccaaaggctttttttctgtgtgtgtatataataaaagaaacaggacaggtttttctctgagtttgaagaagaggccactttagaattagaagttgcctaaaaatgaaaaggcttctgtggttattaataagcttttattttgccctggaggggctgtccagatgaggatggctactggggaatctgggatcacacagaaatatctgcatttatctaataaaatttgtattcagttataaaagcaatttcaaactgttattcataaataaggaagacttacagcttgtgtttatctgagagaagattgtacccagctgttccatgtgtatattagggagaaatataaagtgagaagcctgggtttgatgcgtatttgtatgacagaaaccaacctaagtcagtgtggacccagtggagtggagtggccgagaagacatggtggcttagcttgaagaaggtggctctctggggccctctggtcatggagctttagtgaactcaaaatgtgttgtggtgaacagagtggtaagaattgactggggcttccgtttttaggctaagaaagtcaccagaaagggaattacataccacagaacacaacactttggatgagacacaagtactgtcctctaaaaaacccaaaccaatccctatatgatagctgcttgcacaattaatgcaggaaatccatgtggaacctcgcttctcattcttgtttgcacacttccaaaacttatgcaaatacacattcattggttttcctagtcagctgctaacctaagggcagaattcaggacccttaaatcccaacctgcttctcttttctatcacagaccacatcacatccttttcaacctagaatgcatctgcctggactgatggaaggaaccaacattgtgcgtgaattaaaatgcctggcttccaatcccagctctgctacttccaagcagggcgatcctctgagtttgtgtaccctcctctgtgagcggcgtgcatgagagcttcctcacaggatggctgtgagcgcggtgatgcatgggaaagtgcccttcccagagcctggcacgatggcagctctccatgatgggggatagtcaattccttttttccatccttaatgccagaatgatgaagtaggcaaaaccaaagcaaacaaaacaacaaaaataaccaagaagacaaacaaaagtaacatgacaacaaaaaaactttaaaataaacaagccaacctaaggcatgtaagatttacactgtaaaaagttatctatgaggttccccaaggcttagagagtgatctattgagaactttagaatctaaggagtataacatcagcccctagcctactctttttccttccaagtttctgtgtgtattgcatgcatgtaacttctctgtctctcattagaattgcaaggtccccgagaacagagtttttattttgctcatccctgattcctctgctacagaccagggcccagtacagagtaagtactcaccaaatatttgctgcacgagagaactgatgtccactctccacagtctgcagaaactccgtgaagctgtcagccaaagatccaatgccattcccactaaggaactctcttagtatccttctccttccctccctggaccccaaagcctcaactgtggggaagcatgggcatcaactacattaaagcatttcattctagaaaggctggagacccctataaagggaccgatttccgcaagccatacgataaaatcagcctcattgctttatagtcacacctcatatagttctataaatccaataacaaaaaccattatattgagacctacaagccataaaatgtgttttttaaatgttcagtaccattattacagtcttacccctccctggtctcactatagtatctaacagaatgaccatgacaggtggaaaatggatccttcctccccagagaacccagagtgtggaggagagaatgccgctggaggtaggtttgccaggctctaaatctggacctgccccctgagagctgggggtccccagcaatggaccaagcttctctgagcccaggattcctccttggttgcatgggaaaaacaacatttttttatttaaagaacgagcaaaatgtatgtaaggtggcttgcagagagcttggcatataggtggtactccatgactggctgctccttacggggctgtacccacttcctgctaaaatgaatctgattttctgggtcttagagaggagctagaacttgtgttttgtataacatgtcagttacttgaaatcatatctctcttgccaaactttttttatattgttcatttattttgttaactaattcactacttcattcaaacattctttcttgggttttttgtttgtttttttgtttgttttgttttttgtttgttttggtgggaggaccaatgttcattgaccatctaggcattttgcttggcctggaaatccaaagaacatggtgtgttacctgccctcaaggagtttatagtctagtagaagaaataaatcaggtgtcatagtatggtatgagaagattaaaaatatgtacagcatgctacaggatctcaaaatgaggccattaaaattagatcgggttcttggaaagctgctcaaaggaaaagacccctcaaaggaaaagttcacttttaagtgaacttttttaaagactcaaaggaaaagttcacttttaaggactgggtatgactgactgccatgtggcttctgattttggcagatgagtgaacagcgttgccagtcccagagacatagtaagaatagttgatactgagtagagggcagggcgttaaacattgaacttgaggggctggtgaaacatccaagtaaaactacgctgttggcatttggatatttcggtgttgagcctgagcaagagacaatgtttacagtcatagattttggaatcatctttgcatacatgggagctgaagccctgggtactaatgaagtcactgagcaagagcaggagtgagaagaaatgtggcattaagtgtgaattctgagcaacgcaaacacatggggtaagatgaaaaagggctcatgaggaagcctgaggaatggccaaaaaaatagaaggaaactcaggatcggtgcccacacagaaatcagggaggagacctttaagaagaaaagagtggctagcggcatccactacgagagacttcaggctagcagaggatggacaaccatgcttttgatctgccacagtggagggcactgatgaattttgcagaaggtgttttgctgctgaggcagcagaagtgaggcagtggtgagctgaggaatgagtggaaccccaggtgtggagaaaacaaatgcggtccagggtgtcgagcttagctgtgaaaacatgctggacggagatggggatctgggggaggttggcacggttttgtcttatttcatcttcagcatgagagtcctgaatatttttttaatgtgtctgaaggtgaagagctccttcaaggtgttgtacagctgcctgtgttcatcacagcatttcgtacactgttgatgattaataaacatatacaggatgaattgtttcaggtcaaaacacttccctctctggacccattcagatgcagaccaaccaaccaatatttaaaaaatagtgacagttgtcattgtcatcatcatcatcatcctaccagcagcccagacactagaacatacacctgacagatgctatctaatgtaatcctgttaacacctctataaggaaggtattatttgataaagcaatatatagagaagaaagattactcctagtcatttctagaagtgcaaggtagaaaatgctgaatctggctgggcgcggtggctcatgcctgtaatcccagcactttgggaggttgaggcaggcggatcatgaggtcaggagttcgagaccatcctgaccaacatggtgaaaccccacctcaactaaaaatacaaaaattagcagggaatggtggtgtgtgcctgtaatcccagctgctcaggaggccaaggcaggagaatcgcttgaacccggggaggcagaggttgcagtgagccgagatcgcaccattgcactccagcctggatgacagagcaagacaccatctcaaaaacaaaacaaagaaaatgctgaaccttttcctatttccctcaacattcattgctgtattaccagcacccagaataattcctggcatatagtaggtttccaatcaatatttattcaattaataataaaaataattatgtatctctaacccataccctccagtctcacagatatcatagctattcaagattcatgtgccaaatattaaataatcaaagatatttgtccacatttggacactggattttatcagtggcaaattagctaaaggtggagaacaagaattagagtgattcagtttgttttgtgcccatacactactgatgttggaacacactatttacatggcaagaagttaatcacggtggaaaagcaggtagccgtaccacgtggctaacaagcaatgaagatcagcttcaggtattaggattctaatcaataaaacagagccagattcatcagaaacattgcttgtgatttacataattattgtgatatattgtaactcagcttagagagcaagcttctcataacgtatgtttacatgatagtgccccgcctttattcacagacacactctcagggtctctcatatgctcttgtgttctgggcatgcttgacacagcatttttattgtaggttttgaccaaaacctcaaacattttggtagaaacccacaataaattgggttttgaccaaattggattggacagtttctaaaattctgctgggctgtatgcatcctcaccaccaccacacttatgttagacaacagtatcttggatctgtctctgactagcctcttttcgtccactaatgccccatacccactccttaacccagcactgacattgtattctgtattcgaccctaaaagctttcttctcctcccagcaactctagtttcctgtcttggctggatggaatcagttttacaaagatagagtcagggaaaaataaaacaaggccaggcatggtggctcacagctataatcccagcactttgggaggccaaggtgggagggttgcttgaagccaagagttcaaggccagcctgggcaacatagcaagatcctatctctacgaaaattttaaaaaacaggcagatgtgctgcctcatgcctctagtccaagatacttaacaggctgaggtgggaggatcacttgagtccaggagtttgaggctgcagtgagctatgatcatgccactgtattccagtctgggcaacaaagcaagaccttgtctcaaaccaaaaccaaaaccaaaacaaaacagtccctctgggtcatgaggctcaaaatttcccatgatggcaggaaatgcagttcagaagactgggaaggaaggagacggagaatccattgctcatcctccttccttccacctccaggcattagaaagtctccagaaaatgggtgtgaagaaaatggcaaagaggaagcaaaagaaaaggaaagaaaggggcaggggcataacacgggagagaagcaggatggggtctgactgtctcacataatcagagttctccagggaaacacaaccaaggggagattttacagagatggatcccaagacagaggtagagataaataaatgtatatacttaaatatatatttatttataaataaacaaacacacatacatatatattgtgtgtacaggcacaccttgttttattgtgctttgcttcattgtgttttgcagatactgggtattttacaaattgaaggtttgtggcaaccctgcatcaagcaagtctatcggcaccattttttccagcaacatgtactcactctgtctctgtgccacattttggtaactattgcaatatttcaaactttctcattatatctagtagtgatcagtaatctttgatgttactattttaattgttttggggcagcacgagctatgctcatgtaagacaggaaacttaatcgataaatgtgtgtgttctgactgctctaccaaccaaccattctccagtctctctccttctcctcaggcctccctgttccctgagacacaaaaatatttaaattaggccaattaataaccctacaaaggcctctaagtgttcaaatgaaaggaagagttgcacattcctcgcttcaaataaaactctggaaatgattaagcttaatgaagaagacaggttgaaagccaagataggctgaaaactaaatctcttgcaccaaagagttagtcaagttaggaatgcaaaggaaaattcctgaaggaaattaaaagtgccactccagtgaacacacaaatgataagaaagcaaaacagtcttgttgctgacacagagaaggttttggtggtcttgatagaaagtcaaaccagccacaacattctattaagccaaagcctaatccagagcgaggttgtaactctcttcaattctatgaaggctgagacaggtaaggaagctgcagaagaaatgtttgaagctagcagaggttagttgatgaggtttaaggaaagaaaccatttttataacatagaagtacaagatgaagcagcaggtgcttatgtagaagctgcagcaagtaatccagaagatttagctaagatcattgatgaaggtggctacactcaacagcagatcttcagtgtagctgaagcaaccctgtgttggaagaaggtgccatctgggactttcatagctacagaggggaagtcaatgtctggcttcaaagcttaaggacaggctgactctccggttaggagctaatacagctgttgactttaagtgaaaaccaatactcatttatcattctgaaaatcctagggcccttaagaatcatgccaaatctactcttcctgtgctccataaatggaacaacagagcctggatgacagcataactgtttacagcagggtttactgaatattttaagctcactattaagacctacttctcaggaaaaaaagatacctttccaaatatcactgcccattgacaattcacctagttacccaaaagctccaatgaagatatacagagagatgaatgttgttttcatgcctgctaacacaacctccgttccgtagcccatgaatcaaaaacaaatttcaactttcaaattttattattcaagagatacatttgtaaggctatggctgccataaatagtgattcttctgatggatctggccaaagtaaaccaaaaaccttctggaaaagattcaccatgctaaatgccattaagaacacttgtgattcatggaaggaggtcaaagtatccacattaacaggagcttagaagacgttgattccaagcctcatggatgactttgaggggttcaagatttcagtggaggaagtaactgcagatgtggtggaaatagcaagagaactagaactacaagtggagactaaagatgtgacagtctcacaataaacttgaatggatgaggagctgcttctcttggatgagcaaaggaagtggtttcttgagatggaaactaccctcggtgaagatgctgtgaacattgttgaaatgacaacaagggagtcagaatatcccatgaacttagctgataaagcagcggcgggatttgagaggactgtctccaattatgaaagaagttctactgtgggtaaaatgctatcaaacagcatcgcttgctacagagcaatctttcgggaagggaagagtggggcacagtgcaagggattagatggcacagagagtggaaaagaaagtggaatgcagagaggccaaaaatagctctgtaagcatcctagtggttcacagcgtttccatttacctacattgacttcgggaaaatatcaggatctacacacaatacaatactactatacacaggctcagatttagaagtggcaccttaaatctggaaggcagaaaggaaattggaaagagagaatacttcaggacacaccctgctaacatagcagcctgaggaggaaaacaacccaaatctgtctcatctcacacatagtaatctcaattgttctttcaaaatgaaactgggtgattgcctgtattatgttccaaaatggaacaccgtccaaaacactcactgttacggggcaaaactccaaccttccattaagaaacggaatctgggaaacatgtttggctctaaaattgagcttaaacaggctgcttgaacctcttgaccttgaccacaaagattgaactaggaggtttaaaacaccagagacagaatttaaaatttactactcctactactgccaccgttaataacaatagtaaacaatgtactgcgtgcacgcagcatatccagttctaaggtaagtgacttacgtgcataatctcatttagccggcccaataaccgtaactttacgtgtagaaaactgaggcccaagataagattagaatatcaagagtcaagatgtccctcgaaagccccagtccttcccttcttaccacggtcacatgggaagtttgctgtgcttagtacagagagaatcccgttctgaacaaactgggaatcccacgtgtgtaaaaagcacaactgttgtggtggaagcaggaggttggggcgaggccaggagcggggactgcggatggtggaggtcaacaggggaacagaaaccggaggcaaggcaggatccctgcaaaagcacaggctgcttcagtggagagtaaagcagggctgcgaaataaagctgcctcttctgctctattttccaccatctccctccccctctccatctgtctgtcttcccttttctctctccctctgtctcttctccctttgcaaatcttcagctgctaatttccatccgacacgtttatgaattaattccaacacttttctctctctgtcaagatatcctgctttcgaatctcccccaccctttggcaatgtgcgcatttcattccacacactgttttaccgacaattcccagacgtggtgatttggtctgacatctttgtgtatgcaatcaacccatgttactggggccccgaagagaatactggagactgggtctgcagctggacaaccttgtaactggggtgaggctgcagtgatgctgaggacacagcggggctgaggggagaagcagcaggtgcggcgatgaacaacaccctgccccttcctgctgaatctagcagcctccatctagagcaaagctgccggattccgaaaaagggcatgagtgactttcttcttcaagtagcaagggtctgtcagaaataaccctcggcatcctcatcgtaattaacggaaaactaataaatagtgctgggcagggagtcccaaaaatagttttcctggagatatagacactgacacagacatgtgagcagcaccctgagctgagctgcatcccagtgtcttttcagctttgaaacacgatgtttctaagcacattgatgccgtagaagaatggattctaagatttctacgtcttaaattttaaaaaaaagtacattttaaggataagcagcacaaagatatatgtagctctaaagagcccaagatataaacaaatagtgtatagagtgtctgacatggccgttctggttccatatttgatagatagcttcaatgatggggaggatgatggacacatttaaggtggaagagtcaagcgatgctattcgtagatgtagcaaggagaagaaaagtcagtgccgagcacactgatgtgagatgtaattctattacctaaatatgtgtgaagaatggtaaatataaataggcccacagggccgggctaagcaactgaaaaaatcatggtttcagactttgcagaagttaggtcagctctgtggcctttggtttcctcatctgtacgatgagcccctttgactgatgatttgcaaagcctctttcagatgttaatagcctacagatccctggccattgctggaccactggcctttctaggaaaatattgacatttccatctctctctgcattagctcctgttgcttctgccatatgaaaggtcttcctctgccagccaaattacaagtcttgcctctaaggtcaggctcagaaattaccttccctgggcagtcttccagtttcctctgcaaaagcactccctctgtcttctggatgccctcagaattctatcctccgtactgtaatcttgttacaatacatttgacctagttgagtccaggacactttctctttgctactgcactgaggtctttctttattctcagtaccaagcacaatgcttggcaaagaggccgtgctcagtgcatgtttgctaaatgaatgagtgtgacacttttccgtaggaggtccattttcatcctggcgtttgttttaactggatgcttgtaacactgtacaacagagggccaaggaggcttcttgatgaatcatctcaggaagaaaactgagcaaggggaaagcacagcacagaaaccagcccaattatctcagccaatcccggcccgggctctctctgcctgctcaccctcccccatcatgatgaagacagcatctgcagaccaagagtgtgcctgggaactcacattcgtttgcaattagcaagctcccacatggtaaacagactaattttgcctgtgcatcatcagtttgcctagtcagtgatttctactcagagcttgaggaaaagatttttaagtctagactgtcgcgtgagagaacagaaattgtggaccaaaggaaaaccctgctattattctcatatttgtcacagagggggcacccagttaaagacatgtcatttatttcttcaaacacactccccgaatggacaagtctgtgtttaaaaccatgtttcccaccgaccccagccttggctctactctgtaccatccccaccttggagccctcctctgggaaagaaggctgtgacaaaggttgtgggaggcactattttgatccattcacgggcaggcacttcaccgcatttgggttttcagtctttgctgtttttcgtacaatatttactttacaccaggagctctccaacttagctttttgcttcagcatctccaacctcagaagcacttcatccccaccagcctgccttcccccagtagataagaagacaaaacagagactgttttctctgccagacagagcaggaggcctgcttgacacgcatagaggaatctctgaatggggacctgcagccgtgaagcctgacgtgaccacccctgggctccaacacgggaaactggcatgtcattatccaccccaccactagaaccccagatgcttgcagggtgggcttcaggttacttgaaaatcaccgtgtcatagactttaggacctggaaagggcctccgatatcatttttgtaatgtgtgttaacgctaacatctcccatgtgcaattcccaactcatggccctcaggttctgcttgaagatttccttgaacacaacaatcactacaccacaaattgtcttcaaatactgacaggtgggctgggcacggtggctcacgcctgtaatcccagcactttgggagttcgaggtgggcggatcacgaggtcaggagtctaagaccagcctggccaatatggtgaaaccccgtctcgactaaaaaatacaaaaaattagccaggtgtggtggagcactcctgtaatcccagctactcaggaggctgaggcaggagaatcgcttgaacccaggaggcggaggttgcagtgagccaagatcgtgccactgcactccagcctagtgacagagcaagactgggtctcaaaaaaaaaaaaaaaaactgtggctcttgcggtgagaatgtccttcctgcttccacttccttcaccattcttatatagaggaagagaaaagtgagggagcagagaatgccagggtctaggttgtcagcaaatattagctcttcttcctatccgtattacgatattattattattattattaattgttgctggtcttacttttttttattattattctacattcgaacattgtctctgtcctcattctacctatatcctagctgcacgttagggtcgggcacctaagatttcagggccaccagctgcatcttgaacccttctgtagttacacacttggaattgaatttactcacttcctcattcgatatcagttcaggtgagtgaatgtatacggcaggtcaggcttgtgcccactctgcaagcagccattgtgtgcaggagggaagcctctggaggctggcagagaaatccttctgtgctgaacccagagggcaagacacacctaatggtgctgttgagaggaaagtcacagtccaggaaacacctgaaggtgcagagggaatgacaaaggaaatgagagaagaaggatatataagtaaaagagaagaatcgtttcagtgcagtgtctgaatcgtgttgactacaaaaacacatgggaatattatttgaagcagaagagagaatctccagttacaagcctggtgtgcagtcttcatgatactgcttttcacagcagatgttgttatgtaacagatgttagcatgacattatggtaagagtttggactttgcgatcaatccttcagatgtgggttcaaatcctgattccacccctgagtaactataagaactgaagacatatgccataacctgtgtgagccttagttttctcacctgaaaaatgaggatgataacagccctacttggctaggaagtgattgcatgagagagtacataaaatgtctagaaacgtttgttaagaaagccatttgttccttctcaacctacaaacctgctcaccagtcctccctgttacatcctaccgcttcctcctgcccagtcgctaccatgcaaggctctgccaaacgtccactcctccgtgaccttacagttggcaccagggtcctctgatcccctcagcaggcacatgtggatgacacattttgacatggaatagtgggtaatactactacctgctatgtagattctatcgttcctttatgaaggccagagaggaagctgttatacgccaattttgaaaatgggaaaactgaggctcagaaagtttatgtgagttgcccagagccatcaagcagagactggtggattcagacctaggtcatttacttcaaatctctgcattccttatattgcaacacactgtattttgcatcttgtttcctcagagatgttattcttatgtgtctaattagacagtttgtgtctttggagatagtaaccattttctacacttttctgtatctctcactacatgggtgacacagagtaggaaaataattagataagcagagttcagatcttcaccctatcgcttgtaagctgtgcaacctagggaagtttattcgtcctcgccagcctcatcttcctcatctggaaataagtaccgaagtgttcccacttcttccatttctctctctctctcttttttggggggaggaggtggaaaagagcttgtaaaaattagtgttaattcttcttcaaatgtttgatagaaatcaccagtgaagccatttggtcttaggctgttttgtgtcggggggagatgtttaaattactaattaaacctcttgcctatttacagtttctatttcctctagagtcaatgttagtagttgtgaatttctgggaatttagctatttcatctaagttatctaatttattggcacatatttttgtcgttgttgttgttgtttgttgttttttgtttgtttgttttctttttgagacagtctcgctctcttgccaggctggagtgcagtggtgtgatcttggctcactgcaatttctgcctcctgagttcaagcgattctcctgcctcagcctcctgagtagctaggactccatgcaagggccaccacgcccagctaatttttgtctttttagtagagagggggtttcactatgttggccaggatggtctccacctctgaaccttgtgatggatctgccttggcctcccaaagtgctgggattacaggcatgagccattgagcctagccagcacacaactgttgatagtgttttattattattcttatttctgtaaggtcattaataatgtcccttcttttatttctaattttagtaatttgcatcttttctttcttttcatgttcagactagccaaaggtttgtcaattttgttgatattttcaaagaatcaatttgtagtttcatttattttctttactatttttattatttattaatttccacctatctttattattttctttttctcctttagctttagttttctatttttttcccattttttgaggtggaaagttagattattgatttgaaaatttttctctttttaaatataggtgtttgcacctaaaaatgtatctttaagcaatgctttaactgtgttttgtatgtttcgctatgttgtgtctttagtttcatacgtttcaaaatattttctaattacccttgtgattgtttttctttgatcattggtatttgagtgtgttaatttccatttttttaaatttctcaattttttgttatttatttctattttaggtttagtatagtcagatactacactgtatgattttgatcaagtcatataccatactttccattatttcaatcatttaaagtttatgaattcctgttttatggccaagcatctgctgtattctggagaatgctccatatgtacttgaaaataatgtatattctgctgtggttgaatggagtgcttcatagatgtcttttggttatagttggttcataatggtgttcttatcttctatttccctgtatcatctgcctagtttcatatatattattaagaatgaagtactaaaatcctcaattattattgttgaattggttatttccctcttcttttaaatcaatatttgcttggtatattttggggctctgtgatttgttgtacttatgtttataatttttgtatattcctgatggattgacccttttatcatagtaaaatgtccttcaatctgcagtaaattttgttgttttaaaatatattttgtgaaatagccactccagctttttaattcctgtttgcatggaatatatatttttattttttaaagttcaacctatttgtatctaacatgtctcccatagatagtatgtagttggattttatcatttttatcaagtctaacaatctctgccttttgattgtttaatctagtcacatttaatgttactagtgatgtacttagatttacttttttgtttactacgtgtcacatgccttttttgttcctctgtttgtcgtttgctgctttcttcatattatatgcaacattttaatctctttaatattaatactttttcactctattttattgagatattttattagtgattgctctaggacttactgtatatgtcttaacttatcagaatctacttcagatttatacttacttaatgccagtgagacatagaaatattatttctatatagctttatgcccttttcccacattttgtttcttatacatattacaactgtattgttacaaaccaatagtgcatttttataagctactatttaattaattatatgacttttacagaagctgagaaaagaaaggaaaacaagtatctatttatagagttgatggtattaaccatcttatttgccatttcttgttttctttatttgaccctgtggaatcaagttaccatctggtgttatttcattactctaataaaagttggcacccacccaccacttttactgttgttattgtcagataaattacatttctatatattataagcacaacaatacaattatgtacacattgctttctacaattgttttcttaaatcaattaagaaagaaggaataggcatttatactgccttttataatcgcataattacttttatcagtaatatttgcttttttgtatcaatttaaattactctctagagtccctttctttcagcctcaagactatgctgcagtatttcttgtaaggtggtctgcaagcaaggtttctcacagtttttgtttacctagaaatgtctttatttcaccttcattttttttaaattaaggaattaatgtcttcagagcatgtttaggttcacaacaaacttgaaacgaaggcacatatgaagagcttccctcatctgttacaattgctgaacctatactgatacattattgtcacctacagtttgtaattttcattagggttcacctttggtgttgtacattccgtggatttgacaaatatatatcgacacatttatcttgtacatattttgttaggtttctagttaagtattttattttggtgggtgctgatgtaaataatattgtgcttttaatttcaaactccacttgctcattactggtatatgggagagtggttaaatttagcatgtttactctcttagtctgtttttctgttgctataatgaaatatttaaaactggataatttatttttagaaacaaaacatttcttacagttctggaggctggaaagtccaaggttaagagctacacttagtgagagccttcttgctggtggggcctctgtggagtcctgaggtatggcagggcatccaatggaaaggggcctgagcatgctcgcttggatctctcttcctccttgaaattctcagcttcaaatcttttttttgtcttttttcttcctcttgttataaagctaccagtaccacccctatgataacccattaatccatgaagccatgaatgaattagtctattcatgagagcagagccatcataacccaatcacctcttaaagtccccacctctcaatcctgccacattggcgattacatttcagcatgagtttgggagaggacaaatattttaagcatatcattaatcttttatcttgcaatcttgctatgattgcttattagttccaggaatttttttgttgttgttgattctttcagattttgtatatggactatcgtgtcatcagcatatggactatcatgtcatcagcaaacagatttacttcctccttccctattaatatgcttttcttcccttttcttgtcttggacttctagtacaatgtttaaaaggagtggtgagagaggacatccttgccttgtttctcatcttagtggaaaagcttctagttttcaccttcatttttttaaattcctggttttattttattctttatttccataggtttttggaaacaggtggtatctggttaccatcaccagagcgctatacactcaaccaaattggtagtcttttacccctcacccccctcccacccttccccctgagtctccaaagtccattgtgtcattcttatgccattgcattaccttcattttttaacgttagttttgcttggtaaactatttttgattgactcttttaaaaataccattttaaatatgtcattctactgccttatagtctccaccattgtttctaacgaaatgtcctctgttaatattgttggagagtccttgtatgtgataagttagttttctcttgctgcttccaacattttctttgtttttgtctttcaaccttttccctatgatgcttatgggtgtggatgttttcacatttatcctgcttggagtttgttaagtttattagatgtgtaggtcaatttttctatcaagtttttgaaattctcaactttaaatatttcttctttctctcctcttgttctgggaccccccctgcaactgtgtttaaattgttgtacttagtggtgttccatatgcccttgtggctctgttcacttttcttcacacttttttctctgtttttctgattgcgtactttccatcaatacatatttaagttcattgattcttttgctagttgaagtttattactgagcccctctcataatttttttaaacttaggttatatttttcaaatacagaatttaccatttgcttcttttggggctcaattacgtcttatcaatattctctaattgataaagcattgtcatgatacctttacattatttcattaagcattattccctttagttttttaaatatatttattatgtctgtttgaagtctttgttaaatctgacatctgtggcctctcacaggcagtttctgttgctgtatttttttcttctgaaaagtcacactttcctgattcttttcgtgtctcataattttttgttgaaatctgaatattttatataacacatttcagcaactccggacactgaccctcctggctctcttgtttgcttgtttgtttagtgactcatccatctccctcttcatggtttccaggtcatggtgccccctcaccttctaccttagaggagccaagtgcatcgaggcccctcctctttcacatgcttcattatgtgttttcaaaatacatgtttttcacttttaaattcattttactgtttgaaaatcctcaaagaattatataggcacatacgaaatattttatttatactcagagaagttttacctcaagtctaattacccttttgggaagggtgtgtttgaatatggagaatcatacaaataaaaatgcaaaggagagaaatattaggacaaaaaaaccccagcttttccttaatttaaaagaagatcaacctattataacagtttttgagaactccagaatcatatttacttgattttgcacataccaggctgatctcctttggaatctcagtattatcagtgcctacagagtatatttaaaattatttattgtggcattcatggatctttataataaaactttactttttttccagctatgaaaaatttatttttaataaagtcatttttccataaatgtcacataaaccctcatttcagtcaaatgtaactcactgtctccatatatacattttggcctatgttgcttctcctactcatgataatcttacttttcctttctgtcagggccagttctgtcttttcttctaaacagcttaaatcttaccttcctctagaaaagcctcctgtagtactcatagctgaagttatcttaaatttctcttagttactatagaatttacttcattgatcttttctttggcaattagaaattccctaccttatgttctctattctattaggttcttgccaattaaactgtgcattgttttcctggtgttctagctcctcaggtagaccatcatctccttggctacagtggcagagtcttcatttctctctcaatcccttatagcacagtactaaaaggactttaaccttttcatacacagtgaccgactgtcacaaagaagccttttttctagctgttgagaaagaaggcaagctgaaaaacaacatctttcaaaattcctctagctgagggctctgacaagattgatgaaggccttaattccttgactacacagacaaaatattattttgttctttataatagcttgcacatagtaggtgatcagtaaatattgactaaaatttcccaatggctttcatacagtttgctgtgccacttttcttctattgatttttgctttccactaagtaatgagcatgtttctaacatgctaaaatgaacaacagattttcatgactttatcagggacatgcgcgagtcttcaagctccctgcaaacacagcctttctttatatcattccagctaagcccgtgcgttcagccccaccccattcttgattcttctccagcattgatgtgctttgcactatagcttttcttgacttgatacatctagctctgatcagtgacttggaatggcctctttgtaaaactttcaatggcaaagagctttcttctccttatgcagctgtacagaggtgacaagacagtaagtgaagtgtgaagacacatgattatcaaaattccagggaggctctgtctgcagtcctggggctgagggcaggctgtttggtcattacactgtcacctttcccaccctcttctttactctctttccctcccgcctccaaaccacaccaatactggctttattatctactcccaaatctagatatgtgggccctaaaaccactagaccctactggccccaatctagcctgacaccttgtatgtaacttattgtacttcaattacttgtacattaaccaccctgctgctactgctgctgccgttatcctcttggcaagcatcaatgtggagtcatttgcttttacagcagaaccattaacaggaatccaagggcctaaatacttgccatcccaggtactcagagacagggatggggcattcttgttggtgctggtcacacaggcagacatagagtggcttcctggtccaggcagcttcccagaggctgcagtttcctgataataatgtcttcctgattttgggtggctctgactgggagagatggcagcttcttcgttgtaaaacaggaagtcttggtggccccagtcctgcggtgtgattttctaaaaattcaacctgttttgtctaccctcttgatgactgggcaagccatttaatgtcccacactaaacacctctctgctaaaacaagttgcggtgtattctgggcttacagcaactgcaacctgactggcatgagggccatccacctggcaggggttgtctgaaagcaacaggcaacacacagttaccaaggtcatattcattgctgagtgaatatgctccacaacatgtcaggatggaaagccccattattcattttctggtgctgcatctcttcgtgtgcgtttttattaaagccatcgtttgtcatgttaagcagctgttgcaacataaagagaaactgtcaaataatatggcatttggaaatggtgacattttccttttaatgtctctttcctccatttccctctaccctctttcagactattgccacagtagcaatgcgcaaggaccgtcagcctgacaagtggctctgtttgctgctgaacaaaaacagaactgggaacaggcccttccttgttctcagtgagttctgtgatcttcatgggaaaccgcagccccctgctccctctgcttgaggccctgagaggctggctgtactcattccacagaccagaagttgattgctgttggttcataatgttgttgatggaaaaaagcaccacctaggtctgtctggcacctggaactccatgttaggaagcctgagtgtacacaggtctgagaagagcctcacacagcccatacctggtactgagcctccagctatctccctgcaccaaagagtgtcagcaagtatgacagttttgtgttgtttgtttgtttttaatcaacttttgtgctagtgccagaccctgacttgacaacctttttctcctcatcaatgaggtctcttcatcctcaatttctggctccatcctggcctagattttaagacaaatgtcctccttctcctccttctaagggattttatggagcttatgatgaggctctgtgcaagtgggtattgtcacaaaatataattgttcccttccacctccaaaatcacttattcagacatcccatgcttataccacaatccctctttcgtcagcttgcttctccaattattcccaccatgatgcatctttgaccattttgcaacttcctggccattgactcctgtactttaactcaattcaaaaggtttctactttcttcagtttccttctaaaccagcttggatttcatggtttgttattataattgctccaacaccttagacttctttgctcaataatctttttgtcacaaacttgtcatcaaattccaagcctgggtgaactcagctttctgttttctctgagtctacagctgagaagtcaagcacagttaaggacacaacaaagttgactgattacttaataaactcatgctcaccaaaggcaaagacccttcagccttattctacaattttccagctaatctttggtcacttcatacatctactttccacaatgacttttccaaaccttctccaatcttctcattcccctgagtccccactcatctcccctttgctctcggcagatgatcatcttctacttaagagcaataaagaaagcacggagtggatctggcctagcctaccccttaccaagcatagagaaagcacggagtggatctggcctagcctaccccttaccaagcatagagaaagcacggagtggatctggtctagcctgccccttaccaagcacacagacctatctacacgtgggtcttctttccctccagctgctatggagaagctgtccctcctcgcataatcactcatgtctctggccatgctttgggttttatcccatcttgatgtctcaggaaaattactctaataagcatttcttgcctttattatatttcagcctcactatatcaagtttaccctttctatttgaaatatatgacaacataaactaaattaactttttaacttggtccttcatcttccagctacctctctattagtttcctcctcacttcagccaagtatctcaaagagttttccaaaatgttcgcttccatttctcatctccccatcacactttgcataccaatacagcctttaactcgccactctaccaaagttcttcctatggtcaccgaaaaagctcatcatcactggtcatcagagaaatgcaaatcaaaaccacaatgagataccatctcatgccagttagaatggcgatcattaaaaagtcaggaaacaacagatgctggagaggatgtggaaaaataggaacgcttttacactgttggtgggagtgtaaattagttcaaccattgtggaagacagtgtggcagttcctcaaggatctagaaccagaaataccacttgacccagaaatcccattattgggtatacaccaggattataaatcattctaccataaaggcacatgcacatgtatgtttattgcagcactatccaatgggtattcttaaaccttcaacttctcgagacttctctgtatccttcaacactttctcttccttcaaacactattgtcctttgattttctcctagccctaagcctgttttctctttgttttcattgcaagattaccttcttctgcttggattctgaatgttggggttcttcaaggctctgtttaaggccctctcgtctgtttactctatactttctccagagtctatagcttcaattattacctataagctaataattcactaatcagtctcttaagtctggagctctgtacatatatatccacctgctattttagtatcttttctggaactcattcattctttctctccacagttactgcgcacctaccttgatgccactataggtgctgattatacagatgtgaacaatatagaccaagtctatattgacatgaaacttaagattgcagtaggataataaataagaaagaaagaaaatataacaaatataatgtaatgataggaagtggtaagtatcctgaagaaaaataaagcagataaaagaataacaaatgatggaagttttgttttcagttgtatggctatggaagtcctctctgatgaagtgacatttcatcaaatgaaccatgcaaagttttggaggaaaaaatgccaggcagagaaaatagcaagtagaaaggcaatgaggaagaagcatataatatgagtatatgggtgcataaactcagcataaaaaataacttttcagattcccttaatttacccaacttctccagcctggatgtcccatccaggtttcaagcaaaaaaaaaaaaaaaaaaaaaaaaaaaaaaaaaaaaaaaaaaaaaaaaaaaaaacaagcacacttttcacatccaacctcttactaagtcctgtaaaatctatttttctggaaattctactttattcttcctacttagtcatttcctatcatcagcagctggctttcttttttgcactctgcatcccctatgccaagatctgtccacatagtaggcatatcttctagatagtaccttctcctgtcttcttttttgttttgagatggagtctcgctctgtctcccaggctggagtgcagtggtgtgatcttggctcactgcaacctccacctcccgggttcacaccattctcctgcctcagcctcccaagtagctgggactacaggtgcccgccaccatgcccggctaattttttgtatttttagtagagacggggtttcaccatgttagccaggatggtctcgatctcctgaccttgtgatccgcccacctcggcctagctatctcttgaaacataagactaaagctcgtttcaaagatttactgatatctgcttttgactcttcttccttgtccaacataaggtgttacttatctggtcatgatagagtggatcgttggaggtgtattttattgtgaaaatcagaataaagggtagaaatgccagcaatttccagaagatttgtctgtagttagttatttgttctgttcttacgaagggtggacagctgctggaccagggtggaaagctggatcgaatgaggtggggggaggggttaaaattcagaacacaggacttgatgctatctcagttcctgttctcttaatgaagtggtatttgctgaaagaagctatttgttttcgcatcagaaagatctcctataaaaaacaggcagccatttatgaatctctaacagttgatgtgaccagtatcatgccacctgtgactcgtgtttatttcccttgtggaggccaaggatgaggttagcatgtatagccgcaaccagttccaagctcccatcaggtgttcaagttgatttgcagaaaaatgggatgatgattttataatagctaatagagtttctgatttaatgcagctgctagaaattagcaaggactccattgaaagcttcccagtcacttataataacaggataataaatcactcctagtactttctggcatttataattttattagaaacataagccctagttcagctactcttctcggtttgtttttcatttatttattaaattaccttttaaaattcaaggaaaaagaaaacagtgttcttatttggctgccaaatatgtgaatgagtgatagtgtctccacggaattccttatttcaaaagagattagagaaggggcagaaaatttagatgaagccatagggagctttttgaaattttcattgtcttggggacaatgttaacgcatagcagaaagcactagatgttgactgtgaagacccttgtcccacatactttcctctgctccctgcctgcacgacactgggttactttctccacatctgagagcttaattctctcatttatagaagtgggatcatcatctcttttcaatgtctatttgcaaggtagttggtatgtctcataaaataatacatgtgaaagtgttttgtcatttgtcaggttcaatggatattagatatttttgtttatgaagagctttgtttttttgcttgttgaaaacacttattcaaaataggaggccctgattgctaagctattcacagctgctttgttcccctgccctgggctcctaaggaaggtctacctctctctctctgctggatctctcagctgattctcaactgtgtcaataacaactaaataatatcccaaaatacccagaatctggaactgggccagcttccctctagatttagctcatagatagctatctactcatatcgcagtcacaaaatcacaagaaaatgtgtatcacactcactgtaaatgcagccacgcattcactcatgtggctcatgtggccatatttttttcatattcttataaatacactttggcagaacccctgtcatctggtccttgaattgtataaagaagagatatttgggagccctgggagttactgtacccagccacagctggcagacagaattatatagagtgcatataggagtcttcggtgacccacctgatctacaaacttgctaaagtagggagcaggttcaatgtatttaattcaattccaaaaagtatttattaaaatggctctacactgcttaatgctatggagaataggacaaaaaatgtgtggttttatttttttatttactttttttgcccagaaggagtttatgatctcattggagagataagatctgcacagtccctggagaacatcaggattggatacagaatgaagagcagaaatgggccagaggagacacggaagtcctgtggaaaatgtaagagctgctgaaaatggtttgtggacttgggaagtttccaacaaaacaaaaagaatggaggaatggtgttgagaaactggtggaggcagaaataaataccggatgccggcgggctaaataggacctctgtctgatagtggcagacagggacatcaccttcacagcacaggtgatacaaagaaacacaagtagttgatgaccagtgggtgctgaggtaggagataaaaggtaggaaaatcgtttggaccaagcttgggaagcctttaaaattatttgacttttaacctctaagaagtgagaagtcacatgggtttttaagaaaggaatggtgtgatcagattttggtttaacatagtccccctgatgtcacagtggagagaagagtttggtagcagggaggccaatcaaggtatcttctccgctgaaaagccttaaaatgacaggagctgaatctcatccagctggaagcaggactagcatcattccaaaagaagtgatactcatactgtctttttgtcccagaggggttccctttaaaccactcatgtgaatggctaccccgggggtctgcaaggtgtggctctgcagaagctacgaataaaggatatttctaggattcagatggcaaggctttataaccaaggaaatatccagggtgagggaacaggggtcagtctttggatctctgtcctcctctgtctccatgttcccccttggagacctcatctactcttatggctttaaatataattgctatgctaatgactcaaatacatttgcatatgtataatgtgtagattatacatgtgtatatacacgcacacacagacatacacacacgtatacacatctctttctccgaattccagaattgaatattcatctgctcagttaccctctccacttgaatttttagtaggcatctaaaattgaacatgtgcaaaccccaactcctcatgtcatcccgttcccaactcacagcccccacatgtttcacatcgcaacaaatgtcaacttcttcttttcatttattcagaacaaaaactttggaatcagccttgactctttccaccctctcatatctcatacccggcccatcaacaaccactgccagatgtgccatcaaaacacattcggaatcccatgccttctccctccatccatttcaacctgctctaaaccacctctgtctcacacccggatcactccgcactttctgccatgcaatagattctcacaacagcaggaggaacagctgtttaaagcaagtctgttcatgtcactcctctgtcctgagccctcccctggccccctttcactcagagtacagagcctcgtgtgacgtggctcctcatccctgtctgacctctcctcctctcccacaagtccattctagccacagttccttgttccttagacagcctgctcacactcctgcctatggcatatgaagtggcagccacatattcttaaaaggctctttctccaaacatccacaggatggcctctgccgagaggtttttgctccagtgttctctcagtgagacctcctctccacaaccctcccacggtctcttccctcctccccagcccgatttttctagagcatgttgccatctagcatactgggtttttgtttatgtgtttacaaattaatgcatttattgttatttctactagaacaaaatgttgcttaacatctcaacactcaagaaaaatgtgaagctgggaaagtagacttggtggtcttcagaacgtaagtaacagttgaggccctgggagagggagggtttaaccaggagaatttgctgggagagcagcttgtaagagactgagaaggaagggatgctgatggagaagaaggcagggggattataaaggcaggaggaagcctgactattcagaatgaaagggtgaagagtgttgaagcaaaatattgagccatttggtcaaatatcataaagaggctgagtaagataaaagttaagtgctgaatcttgagtctagatgttagagagaggttattgcccttaaggaaattagttttagttgagtagagagagcagaagccacactatagtgcctcaaaatgtgaataagagataaaagaaatacggatggcaaatgtatattcaccaacttgatgaagggacaaaggaagatgagatggatgctgaataaagcatagctctatgagtagatggggtatttcctgaggtctcagtaacctctagctagaactatgaaaaaagaaagccagagagagatccttcttggataataagtagatgtacaatatcagcaaaatattccccttactttcttagttgccagtttatattaaatctctgaaagaagaatttaagtttggcattttgttattatgaaagtactatattaacaacagtctgacatctttaatccattcaactagaaattatttgtttcccctagaactaaaataggaagtgggaagaaagcaaggtttctgtatttgttctaagtatttcttattttcttaaaaaacataggccctgtggatttattactgataagtgccttgtaatgaagtgttagcaaggaatgcacttgaagtgcctttagcaaatttaatttttaagtgtgttatgcagtcagaaaattgacactaaaaacaaggatgtacgtttccatctccattctccctcggtggtttccgggccatctctgctcagttcatagacaagagataatttggtaaatggcacagcctcaaagtccatttggaactagaacaacgggcccaagggtttcccttcaattaactatttccctgtgggcaaaaaggaaagtccgctgtgaatttcgaggtgtacggtgacttatttcacagcacatacagtcccgtgtcacttaatgacagggattcattctaagaaatgcgccattaggcaatcctgtcattgtgcaaacatcagagagcacttacacaaacctataggctataaacctgcaacagcatgttactatactgaatactgcaggcaggtgtaatacaatggtaagtatttctgcctctaagcctatctaaacacagtaaaatatggtattctaatcttgtgggacccacatcacatacacagttcatcattgatccaaacgtcgttacgcagtgcatggttgtattgggcatttatcttatgcctgcacagtgctaggcaccaggcaggatacagaagaaatggaaaaagacaatcattttagaacactttcagccccatagcagcaacaagacagataagatgtagtgagatgattaggatgtggtttctgtagataaggccacgtggtggttagagcaaagtccaaggtgacaggggcccactctgcaggcagcactgggtcctgaaggcggagttctgttgggatttgtcgatggagggggaggctgtggaagctactggaaagcctgagaggaggttttgggagaacactgagggataacgggcactggcgggaaagggcctgagggaggaatgtgaatttgatacaatgagctcacacaggaaccaccgcacgtttataaacattagcagttgactattggctgaagaggtgttcaaggaaaattaatctgacgattacacgtaagaatgactagaggagagatattacagggggaaacaaaaagacagcgatggatgccatcttggctcacatggtgatcttagactcagcttattttagaaaaagggttaaacgtaaaaatcaatgacatcaccaaataagaattgacaggaaactatgatagctgagtcagctgaagtttccaaaccaacagaatgaagaaacaaatggaaactcatttttacttgccaggttctgtgttaggcgtttcacattttcatcatatttgatctctacaatgaccttgtaaggagaaaaatgaaggtttacaggtttaacgtatttgtgtccgtcacatatccaaacatttgtgaaactaagatgcagaagcaggcctttgggttctaaacccagaactctttccaatgcataatgttctgccgagccttgtcctggattctacggctcgaatacgggcccttaagctttttacatctgctctactaagatttccccaatctccagaccaattcggctactcttgttcctagtgcaagccccattttcttctgcctttgctgctaatattcccacaagcccctgcttctttctcctctccttatctctgttaggatttttaaagctcattttaaatatcatctactctatgaagttcttccatttatcccaaatgtgtgtgatccctctctcctttgaacacctctacctttctctccctccttaacgcttatactgcagttccttgggtgtttgtctcatctataatatcagactgcaccctcctgaaaataaataaggctctttaggtgtccagaaatcttcataattccttcacaataggaattcgttggacaagacaagaaagtaaaaaaggagacaataaaaggcttagagcaaaaaaaaaaaaaaaagttgtagctacactagcttaagagacagctgggtttgacatcaaatgaccctgaacttggaggcaaggggagctgggttctttggataagtcacttcacccttcaccttggttcctcctctgaaatataagcagtttggatatgtggtcatctctaaaaccgtgttcagctgtaatattctgttactgatatttgcaggcagaaaatcaaaatccagaccttgatcatcttattaaactcggatattttcactttttaaacaatcagcctcactccactggtcaactttaataagccagctctctctatgagcccagcaccaagacagctccactgagcccccagcgtgggatgcatgccagagctttcttgggtggcttggccccttgtaaatcacagagttgatactcctgttcccagcctgggtaatgtgctgtggcttatttgcataacaattacatgccttaggaaggctactgattggaacactccttgccaaattatgatggctttttgaatgaagctgcctttcctgtctctgaacagctgctggtgctatgcttggtcttccaccaccacagggaaaacagcccccctccagcttgcaaggttgcttttcaagaggcagtcaccccagcatctctctacatcaaaatctctgctaaagccatggcccggtgacctttcccaagcaggtcagcgaagactctcatagcatcacagtttgggagaaaaacacagcccaagccagcacccaagtgcaatgctgggtaaatgcctctgggattggtccaggcctggtgccaactccatcaagttctcactttaataaaagcctctcagttactcaagcaataaatatttcatttttttttcctgtgtcaacactgcatcaggtaccagcagtgcaagaagaaaggcgcagccctgactcgctgctgggactggtgagtgaccacccagagcactgcatgcatgttgttctcgctgctcatgctgctttgtgcactgtctatggtcctgtcttatttactgggtaagctcctggagaaccgagatcacatctcatttttctatcacttcatccccaaacataatggagtagctcaagcactttgagagcaaggctgatgtctgctattgcttcttccctgtctcccatatcatccaggaaagttatttatttatacggagtactccacaaagcaccacacacatctacatttttaaaataaaaatatcagcacatcttgcccacatatggctatgtgttcttctgaggcaaagccaattatgttaatggcctattaacattctactggtaaaagtgaagaaaaacaaagaaagagattaaagaaggcactaagtaatttccttcttagtaagtactactttgtgccagccactttgtcaggttctaatccattgagtttactattgtctggattcctcagaaggttcctggagggccacattgtgatagaggtctcataattctacctctactactagaactaagttttacagaagagtgaaattcaggaaagcatctgcttccaatgggctttaggttgaccctgcaggtgatctttcccaaggccagaaagcttagtgactatttcattgacccggatccagtatgctatgccaccatctaaacccaaggcttaggtctgctgagacataagacaacttacaattatagctaagctgtattgaacacttattattttcttagagtccttataactactcgataattattcatttaagatgaatttcacaaatatttattaagtacttacaatataatggcaatcaatatgttatatattcctcagtactgggaccttggggaaataaggattagcacttactatctggcacactgaataagacatactaataaattttacaaagtattgcaatatttattctcttttttatccttgcaatatttagtaatagatattgttaatcattattttcccttttcgtaagtataaaaggaaaacagggcttaaaatgttaactagtccaagctgcctggcagccacagctgtaactctgatggtcccagaaccttgtccagtattttccatcgctatgtgtacttcctcccaacctcacaccagcatctttcttagaactctaaccaaagaccactgactgctgattggaccccagacagtgaacatctgcaagcttcagagaccaccagcaacagcttgaagacactatctatttacagtaagaatcctgagaactttcagtgacctgcactgtctcgcattttcaccccagtagtgttctgttcaccctgccgcccgcttcctctgcttccctggagttacgcgtggtgtatccatgattaacaaattcgctcacaggctcagccaaaccaccaagtatttctctaccctcctgtcctttgttcccccgtagaacacctgctccttccatcacattaagaaggctgtttatttactctcatctacccagcatgaattcagcaccttccatttactcttcagcacacataatctggctttcattctcatagttccactgcaacttccctagccaagacacccatggcctcctgtgttcaattcttattgttatataacaaattcccacaaatttatcaacttgaaacaacatgtttgtttttctatagtttctgtgagtaggagttagtaaggcactctactcaggacatcaccaggccaaaatcaaggtctggggtggccaaggctgtagttctcatcagaggctcagagtcctcttctaagcttactggtggttgaaagaatttggttccttgcatttgtgggaccagagttcccattttcttactggttgttagtaagtcacctttctcagtttctagacaccatcctcaggttcttgccatgagaaccctccattggcatatcacaacctggtcatttgcttctgcaaggccagcaaaagaaagcacagtcacctcacacctctctctttcaaagggctctcaccttttaggtcagacttaaccaggagaatattcccttagataaattcaaaataaactggtgaaggacctaatcacatatgatgcaaaatctcttctttccatttaatgtagcctgaatataggagtgaaatcctctcatattcacaagttccgttcaccctcaaaaggagaggattatacagggtacctgcactaggtccatcttacaattcggcctatcacacctccgtattttcaaatctgcttttctctgcttctcctaataggcctattcttccttttccctgcagtaaatcattctgttctgctagtctgaatgtattttctcttggttttccaattgtctctctggcttttcatttctacctttttcacaagtttttctttctttgtgttctatgctgagctacttattttttccaaaaggataattctgtatcatacatcagcctgttgaaatgtgcttttaccactgcctggaatgtgtttatgatgcttcttctttctctagcaaactgtcattcatcctttagaactcacatcaagcatcagctctgaaaacttttttttactttctttccctcaatctaatggaaatacccataaaacctccagtcttcccatagctttccttgaaaattctaactaagccattattttattgcagaaaaatcactgacttactcatctatcactctgactagattccttgagattagagaaaatatctcaatttttttttactaaaaactacctcaagtagtttttagtaaaaagtaaacaatctggatatgaaagaaagtataataagcattttacaggtgaagaaacagaataattaaggttaagtaagtcactgaattttacacattcaataatagagtaggagagaagtcagtctccaacacacttaggaccatctcaggatcccagatttaggaatgtgcatgattattatcaaagtcaatcctaaatgagaataagcacctagcactttgcctggaccataataggtgacctactcaataaacagttttgaatgaaatcaaggaatcctcgaacaaataaataatttggaaataattggaaaaaatatagaaagttaagcttgtaagggttctgtatctgtatgcctttagaaagattttcttcttttaaatggaaattggtacttggttcaggatttaaaacactaaaatgagaatgggtaatcgagagttaattaccatcagggaaaaagaaaatccagtaaactaaaataggaagttccctatagattccatgaccctctggaagcaaattaagcatatctacagaagatgtagaatgaattccaataatgagtcttgaaaaagttgaacgttttaatgaatactcttacaggttatccaagccagcactctgagtgagatgaggcgaacatgagccagtgagacgatgcgaatgtgggagggagcacaggacttcaagacgggtttctaactcttcctaccctaagtaaccatgtgatccatccacgctctccctcttcacctcttctttcgacaacacttcctgacaactaatgtgctaggtgccccaatccctgtcctctagaaactgtctgtcttgtggagaagactggatagtgattaggaaatgacaacccactgagagggcaatgagatgaaaatttgagcattccttgacaacagttttgtaagggggagggaggaagagaagcaccggggaaagaatgacttctacgctgccaacctgaggagccaggcaatggagcctaggggagaagctttcatgtagatgtaagaacgtgaagaccaaggggcctctgcgtgtacctggggcagcaagcagttccgtgtggctgcaatatgaaagaagagatggagacagtgggaccagacagaaataaggatgcagaggtaagctagtggtttgtgaaaggccccattgcgagagagtttgtgttaattctgaaagccaggttgaactatcaaaaggctcatagctgggctagggtggcacaatcagatttgtgatttcaaatgactactctaaccacagttggagaatgtattttagggggcaagagtggagaccaggatggtgctagagccaaagcggtggctatgagaatggatatggagagaaatgaatgaatgcgtggagaaaaaggaagcatagcgtcttccctatgctccaccaactagctcctgagggcatcagcatagaaatcattctttccccaaggcctcccttcaccctggtcccccacaaaactgatgtcaaggaatgctcaaattttcttctcatagtccactcagagggttatcatttcttatgtgtggacaaattattaaattataaatagggaaaatatcagcactttgcctcataagttagttgcaaaacttaaataagattatggatttgaaattaccatgtaaacaagaatgtgctgttagttatgactcaacaagaaagaaaatgcagaatttgctttcaagtaaccacaacaataaaacaaggacagcgcatccacgcctttgaaatagttctcttttttttattaggacaactttgatgacagaaaaggaacaagatcacccaggatggatgagggtggtcagtattccagtaagcagccaggctgagagttgactcactggtcaaggctgtggttttctcctcctctgttttaacctcagggtaaaatggcagttttattaatattaatacacttgcataaagtgctaatttactccatcattttcctaattagctccattgaattgtgagactcatctgcatgaataatgtagccctatatgctttttccaatgtctgtctcatctctgccaagggaagtacggaaagaaagactcctctgtaattctttgattactttggaaaaatatagtccactttctgagaagatagtaaaggcatcaagaatgtccactaattaaagctagacagaaatggggagggctgcgcggccttcttttagaataaataacatgaagcttttgctttaggtctccctcgccctgtttgttccccttggaatgcactaatgaatacagccttctctctagttctgacacaatgtcactccctctgctagttttgcagaatagaagattaaaggcgatgaggtgaggtcaggaatagtgggtttgtttgatcaaaggataaaataaattcatgcctcctttagtctctggactaattatctcaattagattgaaaatggagctattcatataactgacaaaaattaatgtcaagagtatttaaagaacttctaataataagtcaatgagaagtgcacagcaacacagtcaaaaaatgggcaaaataaatgaacaagcatagcagggaggaggaaacacataggaagaaatattctgtggattttaaagactacaataacgttgcattttacccaaactccattggcaaaaattcaaatgccgggcattactaagtattggagaagctgcgaatgttcaggatcttcatacattgctggtgagaggataaggtgctgctctggtaggcagtttggcaacaccttccatatttaaacattcccaaactctgtgacccagcgaatccattcctcagcagatattttcatagcaaccctgttcacaagaggaaaaaatcattggttcagcctagtcaccaacataaaaatggataaatcaactgaggaatattcataaattagaataatctattccaccaacgcaaatgaaccacagcactacagcaacacacaaaactatggataatcttggaaataaataagtgaaaactaaccccaaatcacacataaaaaatgcatgtcctatttatgaagatgaaaaataccaaaattaaaagaataattttagagactcatatgtatgtgatgcaattatatgaaaatggaagcataagatacacatggaattctgaatgatggctaaggtaggaggcaggaaggaggatggatgggggaggaccatgcgctggagatgcaggttgatgccaaggtcctagagcgtgtgtgtgtgtgtgtgtgtgtgtgtgtgtgtgtgtgtgtgtgtgttcagaggtggaggtgtggatctgtggttgcttatgatactattttttaaataaaaataaaaaggggctcaaacatagaatactgagagtgtatcatgggccactggttataaataatacaattctgtgcacctgagattcatttaaaaaataaaaacatttgaactatcaaacatctcttacccatatgaggttggttttcaaagaaaataaagccttccactgcatcattaacttaggtagattcctaacaaatacatttattttatcacccttggatgattttcctggtgtaccaaggtcatatcaagaaaagaaaggcagaaggatcaacatcatgcaagggtatgtgtggattagaagggctgaagttcactgaatcccaagactcaggcagaggagcatgccaccctgcgtaggaacataggagctagtggagaggaaagcttggttcagacagcaatccatagcagctacagtgccataaccatgactgaaagcaggcggggtcattccagaaagatgctttccagaggcacagaatctgaagcacagcttgtcctagtgggtgcctacagggcgtgcaccgagtcctttgtgtgcacagaatgttgataagttagctgtgcgtaactcagagagtgcctgcacttaccatcgatctataactcattgcaaagaaatgctcctatagcgtcaatctcagccatctcctctctcaacatttctgtcaatgcaatttagcacagaatcaaaagaattattgcctatattcataacactaacactttacatttgtacaacaccccactatggctgtccaactgattttcacaactacttcagtaggaaaggtaggcattctattttcctatttgtcatatgagagagctgaggtcaggaaagactttacattggtcacctagaaatgagaattgcggtcactggccctctatgtcctttccaagatgcccccagaaagtaagaaactggaggaaacagagagcccagactaatattgattgaatacactttttaaatatatggcaaacctccatcatcagataagaaaatggaaaatgcagagaactgaagattttagttgtgtgacctagagcaagtagctcgagcattccgagtctctcttgcctgtatctataaaatagagttcataatggtaactaacctcactggattactgggtggagtcataaaatgtggtagcttatgtacttactttaagaaaataaattgcacaaagcttataaatgatgaaagtatgattgaaatcacaggtatatgattccaagtcttgccttttctcctaaggccatattgccccatagaggaatcagagcagataatgcagacaaattagacttgacccgctaagcaaaccataattctgacctaattctctgacatgtactgcccataggattgccataagaaaaatgtctacagcaattcgcactggacacacttcttcacacctgccaaagcgtcacacaaggcatctccccataatttagctattattagaaccacaaactagaaaatcttttgactgtcaagagaacaggacatcaattttcatcttgcatctgctttaaagagtaggagtgaagttagattatcagtgacattttctcactggaaagattgcctggatcatatttgtattcattttcataaatgcaatatacaagcccctaatagaacaaaatctactaattaaattccactcaataatgcattttcaccttagattagcggtgtccttgtacatttctgccagtataatgcaactaatgtcttatttagcttataaatggtgcttatcattaaatttgaaatattaacgagcatcaatgagcccaaagtgacagcacagtaaataatttgaaagggctctacggtgaagacctatttttgcttaatttaatttatttattaaaacttaaacatataaatctggcaggttgctagcttgctgccatggcagcccaggccttcaacacagccctaaaacagaagatacagaaacagccacaaacctgaggcgtctgaagggaaggctcttctcccagtgccttcatttgctgggtgggaaatgtggccaccccaaggttgattcccgatccctgttttccctgcagtttaccttaagagttaagacctttggattaagtgaaatacctggaaaatgtttatgatttccatgttcatatccagaaaagggttataatatctacattgccaacactgtctgtgtaggatctcggtgtttacagcatgtgtgagagggtttgggcaggatatggtatatattagtcaaggcaaaatacattgtggattaatgctgtaacatttgatctcatggatctttaaggagtaggttggaccaatattattatgatgaagccattgtattgatgaagaagctaaggttcagaaatgctaagttatcttcccaagttcacaaaacaagatagaagcagagttatatataactcaactcagaaagccctccaaggcttggcttcaagtctcttccaaacctgatatttcaggtgtttaggcaactgcttctgtacctctttctccagccatatatatacacacacatacacactcactcatccggacacatatatttcttctctgaaatatatgtatatacatgtataaaaataaatatatatacttattgcagagaagaaagagaaactcctattcatattgcaataatatctgtctccatttttattcattgaccacatttcattatctcattaattcatttacttatacacgcatctatttaaaacaaatgtttatcaaatacctactttttgccaagcagtgttttaagcatcgagggtgcgacggaacaaaaacagaattccttgccatcatggagttggtattcttgtgtgtgtatcggggagaggcaggcaatgagcaaactaaatggaaatattggatggtccactaggaagtgttaactaagggagaataatgaatggggagcaaggggtgctagaggaaacgtggaggttatgattaaagggcaaaaatgacaaatttagaatttgataattttccctttggggttctatcagaaggttgttgtctaaccctccccttccccagtacattcataccataaactgattgctgcctaaggatcaaacttccttgttaccagcagaagattattggaatggctgtttgttttctaactggctggagcaacgttgacatccagtggtgaattcgattaatcacaggtgcccccactcttgctctttcatctccgtgtatgggaggagggctaggatacaagcactggttagtagtgctggttaggagtttgtgccgcagttcagccccaggctcctctgcagatccacaccctccccagctcctgcttcccaccctccttccactggtttgccttggtttcaagagcatgcacgttaccatagcaatataactatgtcatccttagtgcagctccaggacgtgcatgtctatgtacgtaggtatctgcccacccgaggtttgcatacacatgcatgtgcttactatgtttctaggtcaatctgtatacacatgtgaatcctgtgttactcacacacagtatgacagtgtgctgttcttcctcccagggcgccctttctgtcctcgggagcatattaataggaacacagaagggaaagcaccctgcatcctgtgtccttttccatctggttgatgttacattgtctgtttctaatgaagcagaaacgagcatggatgccttgggcttacatccccctggatttgctaaccaccgttgagatgccagcaggcgtggctgaccctccatgaatgacaccaggcaggaaggactcatttcattttcttcatgccctccagggtggtggatgcgctgccccgctccctacttacaaagggcagaacacactgcacacagagcccctgccctccgcgagcctagagtctggaaataccatagacagggacagagaaagatctggaatcaactggaatcacccttacctttgtctctaaattcagcacctgtaagcgccactacttatcagttaatacattttatgtgttcggatcatttctagacattgacaggccactgacaactacccccccaccccggaatctgaggctgaggccgccccacaaaactgcattttgaaatcctttctacctctgggtatgggcaaagggaaggaaaaaaagaggccctctaacgagttgaacacactgcacaattaaatatggattggaaagtctccctgagtattcttccccgcatctctccacctccgcagggagacgtctggatgtgattcccaagctgtccccatccagtgattacgttcatcaggacaccagccttgtggttaaagcactttccttactgctgcacgtttaattagacaacccttccccagaaattatttatagccaggttccagagctattgttagtccgaatgtaaataagattcagggcgggagtccccgcgccgcagcggctggtgcgctcctgccaggagccggcgcgcgcgggagcacgtccggggcttttacggccggaactcgggctattaaaaagcccaggcgcgattttctaattaaacttttgatacaggaccacacaaaagactaaacctaccaggtcagcgtgagtacacggaggaggagcctaggagagaagagggaagggctggggaaaaggggcggcctcaccggaggagctgctgggggctcgccgtgcaggcgcctcgtgggtaccagggctgcctggaaaggaacttccagcgaccaggcacaaataactgcttcgagggggccaaggtagtactgagtctgctgaaggctcagggcggggattttcacctgtaagcagcgtttgcaatccctcatggccccaggggacacaccacccacccaccggtacctgacttcaactctgccttctgcactgtttcagttcagtttaaattaaatgtgcggagctgcctccaaatgccaggctctgttcttggtgctggcattataccagctaaatggaacacagcccctgccctcaagatcctcacattcttgtgaacaatgcggacatataatcaaatgaatggaagcaatataaggttataagaacctcaggaacgcttaatggatacagacactttacatgcctcctttcatttaatgtgcacagcacccctaggagttgaatactgttattgtcatacccatgtgtcagctgagaaaactgagactctaaaaggacgaataactccttataggtcacatggttggtaaatagctgactatgaaacccaagcccctaagtaaccatcactttcctctctaccagggcactgtgatgagtgcagcataaccaaatacgtacatctgcaactaagaaagtagaaagggagaatgtgtcatattatggagggaaatggtggtcagagagagctttgccaagaagactaaacgtgagcgggtagctcaagaatgaatggaagtttgctaggcagacgggagtcagagggaggatattatatttgggttatatgacaacccaaatgaactgtgctgtgctcgtttatgaaggcaaacttacatctaggggctaaggctcttactcaatgatagtattagtagtcatagaaggagtagtagtgataataataaaagaggatgtggaaagttggaattggaattcaaaatgctaaaaagaagctaaaatctctcctctttccctccctccctcccttcttccctctgtctctccttccttccttccttccttttttctttcctttctttgatgttgattgtgctcatatgattgaaggagagcagggaaataaaggggataaaactttgaggaaaagaattagattatttaaataaatgccaaaaatctaccttcaatacttcccttttaaagacccctagaagagtgggtctaggggtcaggcaagttcttggtcccaatgtcagcaggacgtgagcctcctgtgagggctaaaaccaaccaaccagcttagggaccctgaagggaagacctggctttagtgaatctggagatagaaagtgtgtccaggataaccccagagaaagtatcagctccaagatgtgcttggtatagtcaagattccaagggtgaaagaagcagctaactctgcgaggcaggaattagtatttgtggaaaacacacaggctcttggaatcaaccaaaataagatgaaatgtgatgcagctcctctgggcagccccagccaagagtcttctctttagagtccatggtggatggtgatgagggtcccttccatcctccccctgccatccatgggtcttgctcggctccctgctgcctagggagcacgcaagtcccttcttcaatagcaattccctttgaaggagagttctacacagactttagcatatttttcaccaatgtctgtcctcattgtagatggggttattaagcatgttgtgccccctgaaaaagaaaaggcacagagaaaataccttgtctgagacttccttactcccactgctcatcaaatggtttggttctgatacaggatttgaaggcaaatgtatgggtgcaaagagggataaagattaaaacttgattcatagctgggtacagtggctcatgcctgtaatcccagcactttgggggaccgagatgggcagatctgaagtcaggagttcgagaccagcctgaccaatatggtgaaaccccatctctactaaaaaaaaaaaaaaaatacaaaaattagctgggcgtagtcccagctactcggaagcctgagacaaaagaatcgcttgaacccgggatgcagaaggcagaggttgcagtgagtcaagattgcgccactgcactccagcctgggcaacagagagaggctccatctcaaaaaaaaaaaaaaaaaatacttgactcataactttctatgtatttttttttccccggagccacaaaacaagacaatctggccagaaaagtctatctcagtaataattttagtgtgcctggcacaaacagctccatggagagtccctgctttgttggcacctctaaggccagtcaaaaccattccacttccagtagggaagacaaggatgtctattattttaaacatataattgattctaattcatcatttatcgctcagtgacagatttctatatagtttattatttctgtagcagcacaggtcctaaggggccgtctcctattgttccacttttcctggtgcggcctctgccgaggcagctccccttatctgtctgattaagttagggagcctggtatctctgggtccccaggtaactgtcagcattgcacatcctccgactgcaggattaaaggagccttttacccctctcctccttgacctgtctgtcacagttagtcttcttgtctgcttattaatttgggactctaggtccccaggacctgggagatagccatcactcctgtgccctcgccctcacacgtatctgcacatgagtcacacatatcttgctcccaaggctctggaaagggaatggaagcacaggattagatagggcagccttctgataccactgctttctggtttttctgtggctgtgctatcagccccggccaccaaatatctcatcaggtgttcccttcccatgtagatctttttgttctgagctggtgaatcaaatacacttccctctgctaagaacaccagtgagctgatgccctgtcatctgttcctcctggaaacgctattcttttcatctgcatctgattggcacatcccagatatgactggggacacagctggagagacagtgctgtatgcatgcacatgccatccacgccgcaatgctggggctcatgtgctccctaggcaacagggagctgagcaagacccgtggatggtggtgggaggatggaagggacactcatcaccatccaccatggactctcaagagaagactcctggctggggctgcccagaggagctgcatcacattgcatcttattttggttgattccaagagcctgtgtgttttccacaaatactaattccttcctcgcagagttagctgcttctttcactcttggaatcttgactataccaagcacatcttggagctgatactttttccggggttctcctggacacactttctatccttagattcattaaagccaggtcttcccttcagggtccctaactcgttggttttagccctcacaggaggttcacatcctgctgacattgggaccaagaacttgcctgacccctagaaacattctttctcttgctaacctgtcatatgccacaaaattgggtttggcatagttccgccatctgattggaatgtcctgcggctgcctgcccatccttcaaggtgcagttaaaatgtccagtctccttggtgagccctgctgagtcccccaagaaacatccccagtctgtcattctgtcacggttccactcatgagggagcccatgacaccatcatgtgataatctgcaaatgtgtcctcacattagagggtgagtttgatagtgtttgctgaatctagctgagtgcattgagcagagttcacccagtggcttacatgtgtaagtctatgaggcaaaggggcactttctccctgtcttctcacttggggggagcctgtgttgactgtgtttacttgttagcatggctactctgggcctactcatgctccaatcccctcccctgtgggaagtttttctgtctactctaaaggtgtcttattttctttaacttctttagggcctcccatctttgtcagttttcatagatgttcataaccaaaaaggggaaaaaacaatccccaacacaattcatgttgtcgttaggcataaaaaaggtattttccagagagaactcttctatgctctgaatgtttgtgaccctccaaattttatatgtggaaatcttgacccccaaggtgaaggtgggggctcttgggaggtgattaggtcatgaggatggagccctcatgaatgggataggtgttcttataaaaggcccaaatgagacacctcaccctatctgccatgtgagaatagtgacaaaatgccatctatgaaccaggaagtaggcccttgccagatacccaatctgttgatgcctggggagtgggtttccagcctccggaaatatgagaaataaatttctgttgtaagctacccagtttatggtattttgttataacaaccgaaacacactaagacaaaccttaactatatacacagaagacctctgaagtcatctagccaaattccctctttccgcagatgaggaaacaaaaggtcagatgataggaaccttgtgtgatgtcaactagctgcaggttgctagcaaagaaagtcctatatttctttaaaatgctgtgggactagttcctgctcccagcagtcctgccctatctggcaggagctcttctcagctcatcatagggatgagctttgcctctggagaaggaattcgtgtctctaaacctactatcatttctctttcagatctcaccctccccaggtggcgagaccccctctcgccccagccccctccctagcaatgacactgccgtttcctacagcaagtgtaaagcacacacagactcggtttggggatagttaatttccaattctttccagatgggttggaataatatccccaggtggtaaatacattattaagaaggcagtttggtgtgaaattggctattaaaatatagataaagtttaatatattgagctccttgtcagaaaaatcactttagagggagcttattatttgtttgatattaaaagagtcacagctctgctccaagtgacaaatggggtcggggggggaatgccaccggtaatgaacaaaagctttttaacatttaaatttaggtttttcttgtagctctgcgtgctgccacgagcgtgcctgtgtggtacagccagaggcggccatcagaaatgtcaggaactccggcgccaaggaggctgccagccaggctgtaaacagctggagtctctccaaaagaaaagagctacgagacagcaaaaagtagagcttcaggtggttctgttggcaacgttgtggaaaggcgacaggggtctatctcagggcaggaagtggaagtttctcccaccttcttccaaagtagcccaacctctacccaaaacgcatccccctcaaaggcagcttgtttcaggaagcctgcttgcactcagcccaccagacctggaaacccatctttcctgtgtagacacaccgctgagccaaatctataaaaaatgaagttgacaagaaaggaggatatcttagaacttcatttttgtttttgtttttttgttttgagacacagtctcactctgttggccaggctggagtgtggtgacgtgatctcggctcactgcaacctctgcctcccaggttcaaacaattctcctgcctcagcctcttggctcactacaacttccgcctcccaggttcaagcacttctcctgcctcagcctcccgagtagctgggattacaggcacgcaccaccgcacccaacgagtttttgtatttttaatagagacggggtttttccatgttggccaggctgatctcgaactcccgtcctcaagcgttcagcctgcctcggcctctcaaagtgctgggattacaggcgtgagccaccgcgctcatcctgaaagtgtgtcagaacttctaagtataaacctgtagttacagatgtaccatacaatacccttgaccaagccaagtacttagtaggcagtatgccatgtttaacaatgcccctcacaagctctctactggaggaaatccttaatgtataattgcagctgggtttatcctttctcacactgacaaaatcctccaggaagtgtgcagagatctgaaatggaggagagaagtaataaggaaggcatagaaaccacactctcttttcatttaaacagtaggccaatgaccacaattagagaaaaaagatgttcctgggaaaaaaataatgctagattggcttaatatggtttgtcccttccaaatttcatgttgaaaggtaatccccaatgttggaggtggggcctggtgggaggtgtctgtctcatgggggcgagttcttcacgaatgatctggtgccatcctcacagtattaagtgagtccttctcgtatggtttcctgtgagatccagttgtttaacacagtatggcagctcccctgcctcctttcttgctccctctctcgccatgtgatacactgcttcccctttgccttccgccatgagtaaaatctccctgaggcctcactagaagacagcagatgtaggcaccatgcttcctgtacagtctgcagaaccatgagctaattacacctcttttctttatgggttacccagtctcagttattccttaataatgatgcaaactgactgacacatggttggacaggggtctttaaaaagaaacaataataataactaattagtatggtgtcaacagggttggagtccctatttcaaatgtttactacccacatgcctacatgcataggtacacacatttacacatgtgcacacacacacagacacaccaatgcatggccccttccttcctaagagtgaacctttataacaaaagaactggtctctggtttttaagctaaactgatagaaggaatctcagcaaatgataaagaagaaggctatgtttttcatctggatgctatcattgggtgactttagcattagtctttccctagcaccatggtcactggttgtgatagaactatagccatagtccaggccaagcctttcttgctagccaaagcccagccaataactgactgttttcttaccacttggaaagtggaggagttatcatgtcacatattcagagggaccaatgaagaataagtggcaaaggccatctggagtaccagccttcctggtgtacttcaatcaaacattgcccaaagtggagaccaatgagggaactgggattaaaacccaaaggcctatagattgcctcagcctcagatcactcaagtattgacccctttctctcagcggaactctaggtgcacccatgataattgtgcagcaatggctgagagggatgtgcttgacaaaatcctcatgatctggcaagagtatttattgtgagtgctgttgcttcagtacagagcagctattgccataagtgcctttgtagctatgagtaataactgtcatcttttaagtgacaagtggctggaattgaacttaacttttgacaaacagaaagagagaaaacaaacacaagtggtttgaaagtgatacaataaataggtcagatggttagactgggattgactctcttgagatcaagacaggagttaaaaataaaaataaaataaaaacaaaagccctttgcttttgaaagaagaattctcggggccaggaatggatctaggcactttcccttaacttattccactgaatcttcactcagcctcacaaagtttgtactatggtcccagtttgatggctaaggaaggttcaacagggtaaggtcaccactcagcttttcagagctgctgaggtgcaagactagactttcattccaggtctgtatagacagaaagcaccttgctcagtccttgctgattagacaggtgagaatgccttttcagttctgcatccatgtattcataaagatctgtgtttgaatcctgtctcaccgcttacatccatgtcgccctgagtaagcctcttaacactttctaccgagggggttcttgctttctttatctatcaaataaggaggatgatgttagttctgtgtgcccacaggggtagcatgaggattaataaatacaatgatggatataaaagttctcagtaagctttaaaatggtactgaaatataagacataatcataaggctattcttcacctttaagtggaattttttctatagataatatatgtgtgggtgtgaatgtgtatagggagaaagagaggagggaaggagaagtagaaggaggaaagagaagaaggacaaaggaaagagaggggggggtgggaagagaagagagattgatcgtaggttgtgtcatcagttgaccaatcctataagaccttttactcaactttgcacaatgctgggcagtttggagacttcttagcaccacttgacctcatttgaactttagaacaactccaggaattgtagttctctttttcatatcagtggggggaaaaatgcaagttaaaagtcacagtgacttttctgatataccacaaaatcttaagtccaatttcttcattcatctgtaaacagcagcatatgccagatattgaaaagaaaaacacagcagaaaacttgaagaagatttgcttcattaagtgaatgtttatttaaattgagaaaatgtcatcaatggtattgtatcagcttcctgtggctgctataacaaatttccacaaacatggtggctgaaagcaatagaaatttattagctcatggtttggagaccagaagtctgaattcagcatcactgagcccatatcaagtgccttcctgctccttcctaaggctccagggaagcctttctttgcctcttagagctcctgctggctgccccacccccttcacttgtggccacatctctccaaccttccagatcagcatcttcaaatctctctctgctgtcttcatctgtgctgtaaaatacctcttggcctcccttttgtaaggatacaagtgactgtatttagggcccactcagataatccaggatgatctccccatttcaagatccttcatttaatcaatctgtgaagaactttttgttataaacattcgcaagttccaggaattagaagttggatattggctggagagtacttttcagatgaccacaatattctattgttttgtggaacatactaaaaaaacaaacaaaatacccagcattctattgcttccggtaatgaattaaagtccctacttcttgaatatctgacttcctggaggccatggaataggctgaattctgagcagtggattacccagagtgttctttgtgctgggcccaacacacaatttctccaaacagcggataaatgaataatgcagatccttgccatccaccgtgtgccctcgaccccttttgacagttgtcaggatccccgccaatcccggtggggcttctggtcacacaggctggcagcacccggcacactgtcccgtgggcagcagatccctcgagaagtccctgcaccccgaggaagtggcacacgtctctcaccgctctggagtcaggcggaaatgccagctgggaaggaggaagcgaagaggcaaagagcaggggctggcagctgtgttctagcttggaaggaagttggacacccacacatctcaaaagcgggagcaggcagcccagagagtgggtctcactcctctgccgtctcatctgaggcctcctccatctgccttgcctgagagtcactttccattgccagtgcccctggggacgtaactgcctccttagaggcttgccagaggaaagcaaatgtgattttgctgtagctgtaatttaatttttattttattttgtgggtcctttggattcctgtagtgttgatgttttattaatggttctgctctctcttcagaggaagttggaatcgtgtctatcatctggcaattgacagccaagtcccagcaaggcagcatgtggaggctgaggtgtgcttggtggaggggacacagaggccagtctgaagatgccctctgcagacgaccgaggtcggccttggccatgcacctcttggccgtcctgacactgcctgccaatgcccatgcaggcactgctgctccatgcgaagggtctgctcctctgatccagttgctgcccccactgctaacagctgctcgggaggccagctggcgagggaccatgccctcgctctccttcagggcttgccttggtgctagctgactttagctgtctactgagaaggttcacaccggacgcgtggatggacgctggctcagaagcgagatcacactgccttccttccaccacactccgtctaacctgcccctctccatctacgggagtcagttcaaacaccatccccaagacagaaatcaacgagctgtggtgtctaggtccactgtatccctcactagcttctgtggacttctccattgcctgccccttccctccactgcaccgagctagtctacatcatggtccttcccacctggactgctgcactcttactcctcccatccctcctttctcagcattggtggcagccgtgagagcctgggaagctttcatgaatgccacacccttgcttggactccttcatggcttcccatgaagtttagaatgaaatccaaacttagaatgaaatccctgcctgctcctgcaccactgaccctccacccaatctctctagcccgggttttcagccatatccccactgccaaccacaattcctggggagagacgattttaaaagattgatagtggaaaaagtgcatgaatgaatcaatagccagaatgaatgaatgaatggctagatccattcccccacattgcttggaagtaacatgacagtaaatgtgatgtagacacatacagcaaatgccgtttctcagatatctgtctacattaatgctttttcaccctaacacccatgttctccttttctacccctgctactccacagctcttaggtactagtttttctctgtagggaggtagggcaggtcatatttggtagagtgagtgcagcttatctcctctgcatttccatagctaagacatatttttgaaaaatattttaatatatccctttccttagggactacagatgttttcctaaccttcacaccgccctttctgatggctcagccatccaagaaaaaaaaactgttatgcatggatacttatcaatatattaaatgcatctaatccagatttttcttatcttttctgttaattctttttaaaaagcttttctttctttttaaaaattgaatcacattattttatgaactccttcaattaggagatgggcatttccctggccctgggggaaagaggctgctctttgctgcctaggatctatttttaatttgcacttaattgcagaatcctggaatttccaatcatcctttgggttagctgtggccctcagactaaatttaggctcatggatgtgtgcagcttccaggacaagttctaaaagggaagatgtctcttttccttgcccttctcttttccttctgagcggagtgtggccttcgtagggagagccatcctaagggcgaccgggaatggagtgtgctcataacagtgagaccagggtttctggcatggggtcattgtgagacagccaggtgggaggagatccctggagaagctccaacctactgaggtcgagccttgggaagttcgcgccatctgtagtagggaggagcctggcccctcgtcttcctgcgtggaacctgggattcaagctgccagtgggaagtgttctagcagggactctggcctggtgagagagattccctgtttccctttttcttccttttcacccaataaaaccctatcttactaccattgaaatggtctgcaatcctgaattttcttggccatgggacaaagaaccccatctttagctgaactgaaaaaaagtcctgcaacaactggaagaccttgaataagtgagctctttaaaggatcaagaaagaaagttttatctccttaatcatcataacttgtttttcagttaccccaattgtaactaataactcgggaactttgcacaaattttgctatagggtgctgttgaaagttgaaagtcgctggccgaaccatgccccactggccagaactatgtgaaactcacaccatctggaaggtggtcagtgcccttccctgatcccacatgtctgccacttccactttttctgctagaattgttccagcacctttctgcactgtgaggtgtgaacacctagacattggcctgacaacgcctgccccatgcacacagcaggtcctgccttccactctagcaggagcagtgacaccagggtaactgggcatgaagtgctggccaggaaggttatatcagaatgcagtaggctcatgctatacctgtcatggggccacctaggctggtgtagtgcttgtggcataagcaggaggcctacctaataaatgtctgcaaaatacctgaactgttaatccttctccctctaaagcaatcatattcacttaatttaaaacaggagagaggaaaggcatgagaaaaaaatccttttctttccagactttgagaccagatgtcaaaccagtttaagaggagacatcccctagagctttattttccccaaacttatcaggcagccttacaggtacatgcccacagattgtggccttggggactctgtctcacatagcacagtacaacctattttaggctttgttgccccaccctccgtttattttagcaatttgtggttatattcaaaataactgagctatttatgctgttgcaggatacagctccatctataaatgacctcagcagaactctggattgatttaacctcccttatctgtgtgattagctcagccacagagcagatacttggtgcttatcgccccattaaagagtcaaagaatgctgttaccagttttttatctccaaaatgcacacaaagccctgctgattattctattaatttgttaatgaacctgtccttagacagaatctctgttcctttggaaggcagggtggggaactgagcattcaaaggtgtttgagccttcagaggtaaaacttaaaactctagaattgcttgtagaagctgggatgcacatgcttatttttattttgcatttttattctctttcagtcttttattgaaataataggcacacagagagatgaagaaattaagccagaaaaagttcagtgtctgatggaagcagacccaggcccacacagagtggtgaaaagacgcaggcatagacattttgaatagttagcacatgtatcatatctccttgtggcgggatcactcagctttttgcagttgatacacggatggcaattttagaacaaaagattgtggggaaaatggtttatgcttttcttggatatgttgtcctgcatttgaggtccattgtgcatttatgttttatatattcacagacatgcagagaattccatgaggacaggcacatgtctgcatatgcttcaagtgcattgcaggtgctgtgtcaagagagctgtctcattgttgagatcttgctgtacggctacttgcattggaagctcttggattctccaaggttttcaccttctactatggatcttcagttctccaagcctcttgggcagaaagatggctttaaaataacatcagtgaccaagaacccttgggtcattccattggctacagaattaagctcagaccctacacagtgttggccacttgtgacttagtagagcaagaaattgggtgaatcatagagagttgacaatcaattgtggtgcataactactgcctggtaaacaactaaaatgaaaatgggaaagagacctgaaaggaatatgttccttcaaaatcagagcacaatttcagaggacatccgagattgtgctcaggaggtccttttctgatttttttctttttctgattgtggtagatgccatgatgcagtccccagattccctttgggagagaagaacgtatttctccaggtgccaggaatattcgctgtggaaggctcccagctgagcctctctctgggaactgccctcagtggacaaaagctgcctcattcgaggtcactccactttacagggacagcccacttctaggactagggctatatgggagtggaaggatctgtcatcctccctttgtttggtggcaactttgaaggccattgctgcaccagaatctccacaggactgactgaggcctctgatatgactgcaacaatgtccactattcctttcagccaattctgatccacttcctgttcataggtgttcttcctgacagtactccctaatgcactttctgaacaaaagtctccatctgagagtcaattttcatggagcccaacctaatatatctggtcatatgagtgatctgcacataaacacacctgattaaggagtcacagcaagaagactgagcaattttctacattactgaggagattagcatggacatggactgacatggattaatctctatttgacatctgtttcaagttttgattacttaaacatatttactcttccagattacttaagtctacatgtatgggcaggtttagtgagattaaatgcattctttaattctatttaacagagaacactgatttagattaggatttatttactctttgtcctttcaagaaaaatacacattgtctctaacatatgtagatatagtccctgatctcagggaacttcaagtgttgcaagaaaacggacataaatacttgcttgttaaaatgcaatggtacatatttggaagagctggctaaggtaacaaaacaacagaatctagaataaaaaagatgttcacagtctgttcaaatataacaacaagttaatatttccaggaacatatttaggaagtctggcacttttgttcctaaaatcaactgtactgatacaagattgatcgacctaacttaggagtcaagttcaaagaacctaggcagtttaattcagtagccatatagtattcagaccaagtgaaacattagtccactctatactctacaagttggacagtagaaagcagcattccccaatctttctggcacaagggactggtttcatggaagacagttttcctatgaatggggtgggtgcggagaatgaaaccgcaccacctcagatcatcaggcattagttagattctcataaggagcacagactaggtccctcacatgcgtaattcacagcagggtttgtgctcctatgagaatctaatgccgcctctgatctgacaggagatggggcgcaggcggtaatgctcactgctggccactcaccttctgctgtgtggcccagttcctaacagggcatggactggtattggtccacagcccagaggttggggacccctgggatatctactgtcttcagttctagatgccattagaaagcattcagaggagaatgcccagaatggtaagaggtcagaaattcagttatttgaggaacccttgaaagtctcgcctccccctagtcccttttcatatccagcaatacaaccaaagagtttcccacagctgagctcttcttgggatgcctttgcattttgaatccctactgtcctgtccactcttcaaggagcagctcagaagtctcctccatagtgagcccaaccctccacttgggagttggctttatggggagcagtttgctcacatctctgtcacagctcccgtccttctttctgctcttgctgtggcaatctacaagagggctgccagggatcagagctttgtcattccagcatctagcagaatgtttgctatacagaaagtgtttgtcattattagataaatggataatttgtgaataaatgggtgaacaaatgaatgtgcaaatcctaaatgcaagaggaggcagcttggaagtgagaacacttgtaagaggtggaagagtcttcagatatttaaagcattattaaaatattcttgtaacacaacaaagaaatacagtctggatcatagctttatggagtgaatctgtaattaacttaataactgtgaccaaaagtttttgattaatgaattagtggtgatatggaaggaagtctttagtgataactttaagattctatctttagccttatcctttttaatatttctatcaatgtgttgaataaagatataaaaagcataattataaaaaagtagggatgataagaagccaagtgaaatagtaaataaattggaagattaaaagcaggatgcaagaatatctcgagaagctagaattatgagctggtcttgccaagttgatattcaagggagaaaaataaaaagccatgccaccaaatcctgaaataactgtaaaatagaagatgaggaacatgaagcttaactccagcttttgtaacaatcaacagggaatttatttgtgtgtaagttcgtaataagttcacataatcaaacagcttgaaacaaagttaacccaaacttaggaaacataattggtagtacactatctggaatttttttagaaagatgtaggtaaactgttgcaagttgtattcacagcagtacaagcaagcccggcaagagttcttaaaaccatgttatttaagaaaataagaatctggcagggtaaacatggagacaagaatattcaacagagaccttgtctatggctaaatcaagcagagctgaaaaatttgtgtcaagcacatgggatcaggccctttctatggagtctaagtggcagcatgactcttgagagcagtacatacagaggacctgatttcaacttccacagaagaagaaattcttagtcacagttattcagaatagtgagggccagtgtgagagaagtgagccccatgatccctggttactgcaggtgttgaggctgcaaccttgaataatacccacggggaaccctctggtgtagattcatgtattgcatagataattggagtcaatgaccttttaggttcccgagattccatgattttacccagagttgacatgctataaaactccagaaggcaggactatgctcaatttaaggaaaaactttctaaaattaaagttatttaaaaactgaatgaacagtggtttctcttttttttttttccaggtatattgttttaatagtgatccttgtatttgttaggaagctggagtcaattatctttacagtcccttcaacatccaacattatggggtaaagcgggaagacaggcagtcaggagccattggttatagtccaagctctgatagaagttggcaagtcatttaaccacacctagcccagtgagcttatctgcaaatagggctaacgttatctcttctgcaaatagcatgcattgaaaggctctagaaaagttgactaagtatactagaagattaatgtgttcttggcatggttgctagtgctgccattgtaggtcaaaaacagccacagacagtttgtaaacaaataaatatagctatgttctgttatagtcttatttacaaaacaaatggctgactgtgtttggatcatgagctatagtttgctcactcttggtctaaaaaaatggttctctactggggacaattttacttaacaggggacattgggcaatgcctgaagatattttttgttgtcacggctccggagggggcacggtattattttattgacatttaggggtttgaggttagggatgaagataaacatcccataatacataggacagccttcctcaacaaagaatcatctggacagaaatgtcaatagtgtcaaggtcgggaaaacctggcgtagacaaggaaaactattatttgtgcttatccaaggtccttagcaacaaattcaacctcctgttggcttttctagtacaaactacagaactctagaagattgggattggaagcggttggaaaacaaagagggggaatgtgaatctctcttaattcgaatcaactgtaaaacaacacaccttcctcaaagaagttttattttctttaataatggtgttgcacatgacagaaactcaactcatagtttagattagattaaaagcaaaagtgaattgagatattttctaatgctaaaaaataaactctgtctgggccggacacggtggctcacacctgtaatcccagcactttgggaggccgaggtgggtggatcacctgaggtcaggagttcaagaccagcctgaccaacatggagaaaccccatctctactaaaaatacaaaattagacgggcatggtggcacatgcctgtaatcccagctactcgggaggctgaggcaggagaatcacttgaaccagggaggtggaggttgcggcgagatcgcaccattgcactccagcctaggcaacagcagtgaaactccatctcaaaaaaaaaaaaaaaaagaaaaaaatcagtctgtacttggactttcccacagcatcctggatatttctagcattctactcagactttcaatggctcccttcccaaaggactttgcacatctaaactggtctggcacctctcatgggacttggcaccagagttatttaattaccccctcattctgcaacaagaaaacaaggagaagttatgtaactgattcttggtcacttgattatgtagtggtagaactcatactaggaccatttttccggtggagcccacttaacttgctgcaccatgtgggctctgttttacagagaaaaaggcagttcattttttccaggtaaaacctctcctggatttaaaaaacacaagaacattttctttttttaacctatgtcactttttggttggtgtacaatatttcaaaaatgaaatgtttaaaataatgcaatgaattcaaaagactagttcaaacaatgcacatatccaatttatgccagtcctacaataaggcaaaattttattaaatgaaactcagtaccgcatatcatatttaagtattcttataaaggtttatttaaacattttctttgaagaggaagtatttaaggatgataaagataattactcatcataagcataatggtccacttgacagaaattaaatgtaaggataacttttaataaaaattaagcattagaaacctctcttctaccactctggtttgtaatgtatttttaggaagatggtcaaaagtgccacttattctaccgcctcataacgccacactcaacagtgtatagtcaggctcttctgtattacgtaggacagtaagtgaaggagagccctgtatcccactgaatcctcaaggtgggatttatttgtacctgctgcaggtgatgaactggtctagggccagtgtcagagaagcacagtgctataatcaattccaattctcacctgttaggctgggtaagagaccaaaatttgccacctcagaatatgaagaattgttgagctgaagacaattaagaggaagcagatgcacgacagctctgtgccctgcctctatttgcttaaaagtaggacatagatttacaaagacaaaaggaaccctgctcctcctcccaccaccaccgctaggaagaatgaaggttaaccactgaagacaactttacattcttatctactggagatgatacccaaggactccacatgaacaagctttactaactggcctttatctgccagttatttgcctgcccacaaattgttgcccctagagaatcaaagtcctttcccattatcttgttgcttctctaaaaactaactgttcttgaagatgctatgtaagttggaattcaaaagccacctcttggagaactgctcattccctaagtggctctcgtgtgcatatgaaatgcacatgttgttaagctgcttgttttttttttcctgttagtctgtcttttgttatagggatctgtttcaactaagaacctatggggattgaagaaaaaaattattgttctcccctacggttgcaagatattctgtgcctgctgcttctacatctcaagatgatgtttccactacaggctccttccccatgaaggaagggcagggcagcgctaaaggtctcacggctcactcaagtatcactagccatctgtcagcagagtccagaggctgtggccgagactgtatgtccatgcaggagacagtcctttgccttcattcggtgatgcattcaatgtcctcctacagtgaggtacaggctctgctctgtcctggggagacaagctgcaagcttgcatttgcatgagaacaacatgtggcccagcagaaggagagagaaagaagtaaacagttttaatctgaactgaacacaaatatttctcaggctagacattttgaacattggtcatagccagtttatctaagtctcaagccctctctctcttctccaacccacatctactgtcctagtattggtgccgtattttctattaagagaactcttgcataattctcccaaattcccacagacagaagaatagaggaatgaagaaatttatcagtgtgtaccctcaatggaataacgtccagcaatcgaaatggatgaaatgcatctacaggcaactcataggattaaagttagcaaacacagttacaaatacaaaagagtacaaacagcataatgttctcttctaaattaaagaaaagaaacctaaacaatatacaggtaataaatttacatagatctgacaataccagatagataggcaggttggaaaatagattgattgatagagtgatagatcaattgatcaatagataagggataaaagagggaggacacacactagtagatgtaaatcatcagtgttttggcttctgtgttgggtagagtgttagaaagtatgcgttgtattatgaagaaagaaaggaaaaaaagaaggaagggagggagggagggaggaaggaagggaggaatgaaggaaggaaggaaggaaggaatgaaggaaggaaggaaggaaggaaggaaggaaggaatgaaggaaggaaggaaggaaggaatgaaggaaggaaggaaggaaggaatgaaggaaggaaggaaggaaagaaagtcattgcacataacagtcatgagaatgtgacatgaacccataattatacttaatccaattctgtgtgcctgaaggccaagtagaaaaacaaatgtgactagtcacactcctgcttaccaacacctaggactccctatcaccaaagcaagatattgcccaatttttttggcatgcagtgaaaaatccttccacatactgactgttgcctgactttccaaaatcatctctggtcaccgttcatgtattacaaactccagctgcaactgatcttggctcctcttccccacttgtaacaaacacctccagaccactctgcccttgctcctgctgtttcctcctacaatatcctccccatccctaacaaatcctatgcctcctccaagacccagcccacccatcactctctctgagacagctttgctgagctcccttcacccctagcataccaagcaagaatgaacccttttccatatccaaggctccttgtgcccatccctttaacaaatacttacatattaattggctgtacatcctcagcctctcttgtttgtgagatccgaaaggacagggctctattttcttcatttggtatttctgaagtgtagtcattttctatcgttgtataagaaattaccaaaaatgtagtgcttagaacagtttattatctcaaagtgtgtaggtcagaagccccgtgggctcggctaggttctctgttttgggcctcacgaggttgaagtcaaggggtcaaacagcctggattcctatttggggcccctgcagaagatctgcttcacactttcttaagctcgttgattgaattcacttccttggagttgtgggactgaagtccttgattccttgatggctattgaccatgggctgctcatggacattccttgatatgggctcccttcgtcttcaaagccagcaaaggcctgtcaattcctcctgctactttgactctctttgatgtccctttctgtcatcagctggagaaagtttcttgcttttaagggttcctatgatgacactgagcccacttggataatccaggatgttcatcctatttcaaggtcaactgtgcattagaacataatataatcagagtgatagctcattatattcacaggtacctggagttaggacgggcatctttagaagaccattttagaaactttgcctgccatattcagtgtgtaccacagttaataaaaaggagagagagaagggatgtctccacagcttatttcagtactttccactggtcccacatgtgcacacaaacatcctcacaggcaaccacaaacatataacatcctggaaattcaggcccactctgctcgtttataatgaggcctatgttcttggtccaaggaggtattggaaaaatgtcctcagaaaagactaggcccaactttaggtctaataagtcagaatctttgagggtaatgctctgaaatatgtgtttttaacaagctgtaacttttctcaggctgtgaactggatggcttacacaataaacattgatttttcacagttctggaggttggaattctaagaccaaggtgcctgcagggttggattcttggtaagggctctcttcttggcttacagatagccatcatctttctgtgtcctcacgtggcagaaagaagacactaactgattttctgcctcttcttttataagcgcactaatcccatttgtgagagctctgccctcacaacttaatcacctcccaaaggctcttccttctaacatcatcacacctggactaggggttcaacatgtgatatctgggggaatacagtctgtccaggtattactccctaggtaattcttaggtaatttaatgtttgagaaccaccatcgagacccctcttttccttttatttatttatttttttttttgagatgaagtctcgctctgtcacccaggctggagtgcaatagcgcaatcttggctcaccacaacctccgcctcctgggttcaagcaattctcctgcctcagcctcccaagtagctgggattacaggcatgcacccagctaattttgtatttttagtagagacagggtttctccatgtgggtcaggctggtctcgaactcccgatctcaggtgatctgccctcctcggcctcccaaactgctgagattacaggcatgagccactgcgcctggcttcttctttagattatagtttatatctttgatgcttatttatgatacagatgctcattatactcaaattccagcagaaagctgagtccaccagtctcaatgcttgctagcaattggaggaatagtaacatacacactctaggagtgatcaaggaatagctgaccagcagtcgttttcaatgtcagtcttcagttttgcagaaactgtacaactggtgcaaagaaagatctggctttctgtggcacgggttgcagcccccttgcctcctgagcatttttttctgaagacccttccttggtagcgctctgggagcatgggatcagcccttgatacctgcagccactgcgagagggctgtacaggcaggcaggaaggtgtcttctcaagggtggggatctctcttggctgtgagactgtgttcctgccatagttttcctttgggttaaaagtaatctctctcttatttaagagtctgatagctagggttgttactttccttttgaaaaacccattaaggaacagaaaacataattcatctggagcaaagaaattggccccctattaaaatgtacattgaatagagaaacttctggggccaaaaatggatgcagaagatagaaagtgcagtatatatgtatgtatgtagatacgtgtgtgtgcatattctttctcctcttttgtcctttttacttctttttcccctcctttttattcttcctttccttctctcttttcttttccccttttgaaacgtggccagccagaacaggtacaacacccccagaaacactactaccagcctcctctccaaaatgcacatcaattcagacgtgcccttttgtagatcggaaaatccgacccccttttgaagccagatggccaatgagatgggaggaaaagggacctgaattgtgctccgcgctgtatttagaggtcagccagtccattgtgcggttgctggtttcacaccagcccttgagaagccgttcagtataaagagctccgactgggcttgtgctggaaacagcctcttcctgatcccagagggcaagaatgtgccggggcacacagcatcacctatggccccgtgtaccccgaggcacacgctgtgtcgtccccccagcaacatgcctcaaaggcggccgcagctgatgcggcttcaccagggtcagcccttaaatgaggactgacaaaaccaaagctctgtgtgccgctcccatgagccacagggatgatactgagacactgactctgctcctgctttttcagttgtggagtgagcttgaacagagtcccaaatcccctgtgctcacctacaatcctcacattctctgggctttgttctcaaagatgatgttactgtgagtgattatgatctctgcaggctggtgagacaaaagagaccagagcaggactgtcttgcttttgtttcctggacacatgacacctggcctgtggattgtggctttggttgccttttgaaaagccaggctaagaagaacccaagtagtggactcccatttgcaagacagtgacataaagctgcagaccagactgcagtagaaccaccacatgggagaagttcttgtgtccttcaggatttgaaaaggaactccaggtacctgagtgatgtttgggtgaaaccagagataagatagttgaggcccagccccaaggtgacctctgaaccagtcccctccagtgagcagagagaagtgaggtcaggcggccccttctccatgtctctccatgcggacaccacttgatatttgaatctaaaggttaattaagtgcagctgccaggcagaaagaccacaatcaattatcatgtcttcttgtccatttcagcctattcttaattatgttcattgggtttggggaagaaggtctttcagctaagttttagaaaaaaggagctattttgttttgaacagagagatctcccttcctagactacaacatctatcttcatcaacccacggtgttccatgggcttgtttgtcacaggaaaggggcactgggcagagtaccatggagagcatccctgggtatccctatgggcacagagtgaagcgcgcatatgccagggcttccttctaggaattccttgacaggaagggccactcctggtgcaaccactgaaaacccagtgtcattctccggaattgccctcctatgaagcccaggcccacgtaccagctgagggtccactcaaccacacgcacacaggcatgctccccagtgcacacatgcacatgctgaccctttgtcataattaactatttaaaattccactgctgctaatcgaagcagcacggctgtgttctcattaaggagatcaattcctgttgaatattcacctccaggggcggatgcggtcggaatgagctgagggtttctgtctagctcgccagagctaatgagtggctgctgccattacaatgcagtcactcgcctgtaatcagtcaaaataacaagcagtagctccttgcagggctgctgggtattctacataaatatacgtagaaagacagtttcagcagaaatggtcggcccatctcaatgaggcaggcctgaggtgtggcctccctggattgcaatggattgcaagcccgcctcagctggactgtgcttccttctccatctgtcttccctccctttcacccacagacacgctgcatggctgtctgctacagcccacttcaacccctctgaatatctttaacccaacttgtttctattttttagtctctacttcaagtggattatcccagttcagaagcctcctgagacattggctcagcactgagaggagcagagggccagtggctttggaagcagtttaggtagtggctccatctctcctgagctgtctgtactgcagagcaggcagctgggatcctgtctcttcctttccttttctgggaactcaggattagagaaaaagtgagtaaagaggggggattttcaagatggatcaaaataagctgacacaagtcagttcttggctgatacctgcacacacgagagagtaatgtttctgagctatgggataagaccaatttcatgttcaaaaaaatgacttaatggtgtagaaaagcaatgattttcttttaatatttagtttggtacacgccaattaaaacaaatctcagtaagaaactttttttttctatgttttttggaaaatcttacaagagtgaccttggcaaagaatggattttaatttttttctccttcccacttggcatacatagactctcagagacttttaactgatcaatgcatatgacaagacaggccatttaacctaagacacacatgcaccctggctcattcattgatgtattcatttctgtgtttattgtagaggtctcccactccttacttcattccttcagccattcaggagacatttatcaagcattcccatggaccagacactgaattaggcatcaagatgacatggtccttgtgaagctttgagtcttgtaagaggatacatacaggtaagagaatgaacacaatgcagtgtggaggtcattgacttctgatggtgaaatgtttttgcccaattttttaggcgagagcattttcttagaaataactcctaagtccagacaggaaagaaacttgttttcatgaacagcccacctcaaacgtcaagtggacaccccaggagagagcccccagggtacgcttctattcaaggagatctgtttcataatccaacttttctgtgatacaccccagttcacaagccgaagacacatttgttctgtgtggtcagcatggttgtacgtaaggctttctcaacggcaatgagctttgctgcatcagctggagacaggataatcaagtgggcagggagtacacggcttcctcctgtgctacgggcaggagggagacacttgctcacttaaaggtatgagccacatgttattgaagaaaaagtggcaataaggggatgtcatttctaatcttgtcccagcattccagctcacccatcctgtgatccttatcagtcattagagaaggtaattaagccagtgtcttgctcacaccgccaatactgagctggtcgaaaataatctgcacccagtgagcacagcaaattagcacaccctcaatcgttggcatcaggggacatttaagctccacttgcctgtgacacggcagtgtgctgagccccgtgctacagagcaaagcagactggatgctcagtctttaaggggctgctttctaagcacatgcagtgatctgaatacacatggataggtcaaacagaaggaaagtaaaaccattaagttaagtcctgaatgagagaaagggactgacaccctacaaggtattcagccagtggcttgcttggggtgggaagaatctgggtttctacttcgcagtagggcctgaggaactcaccatgtgatctttggttatgagtgaaggggctggcaattttctgctgatggagatgacacatttttctggagatagtggagtttcagaagatgtccaaatgatgagaaaaatgacttcacacagtaaacacttgaaataacctatgagtcccgatggcacactcttgtgaagggaaacttgatggatgaactcactgttctttcccactcatgcctttcttctgttttttattttactttttaaccaatcaacacattaaacatgtagatttagatatacaactgcagtttcgttacatggatagacagtgtagtggtgaaatctgggctttcagtgtgaccatcacgcaaatggtgagcattttacccaataggtgttttttttttttctgcttttatccctcacctccctcacaccctcccgtcttttgctgtctccagtggctcttattccactgtctgcacatatgtactcattccaacgcattttttaatatctgtaatgtgccacccaaccaaggtggaacagaagtccagataaatattcatcatagggggttcaaagatggacctctgctttttggatggggttttggtgacgcaccatggaaaaatatcatccgtggaataataacaggaagccactaagccaaagtcacacaatcgataagtggcaaagagacctaacctaaactaatccttcccttcaaagcttacccattaattccagagagtcagaccatcatattttccttttgcaattaagagaggaaacaggagcattggagaggaaatgcttggaatcatgggctcttgctagcaatacagggaatgcttttgctgctgagcctgctcatggggaaaggcaggcgaatatttgtacacgcattacacccattggccttatctcatgcattttggcatcttcattgtttggaaggggagcaatgaaacactgttctcagatgagttagctctttaacataaacctgcttgctctattgcaaccccgacctggtgcaacagttgtaggactcagtgccataagcaggtgcagagcccttcaaacattggtgagtgttaggtcaaagggcttagccccactccaatctagttccctgtaattatctgcttaaaatagctttggctgtccattgacttcctcctggtgtcccaagctgcagtgcagccaagcagtacagctagacaaccgctgcgttttgcctgcgggttgtgtgatggatttctccatacagcatcattacgtccgctaagcacttcacgatgctcggggatgaaaggagttataaatgaaagatattattattaataagaatgtagatgaacaaagggaaaatgtactcaccctcactatccatcaccttaccacacttcacctaaagaccatgatctgctggagcctcaaggaaagcctatttgcagaaatcaataactggttttaaaaaatagatctaggctccgctggagctgactactcagggacttctcataattctacgcaacagtcaatattagccatcactgcctcaaataaagattgaattcaaatttagttaagagtagttttgtatgataatctaccaagtgattattaaatgtatttacagagggttttaaaaataggctgtgggagaaaataaaagaaaacaaaaagcctgcctgagtctacttgatgtgagctacgaggctgactcatagtgatggactcacattagcttggtttgcctgctttaataaaattaacacttggggaaatcgagtttcattctgtgggtggcaggaagcatttccattctatgcatcataaggtgaaggaagaataacagtcactgagcagccagcagcatggatcagaccctcaccctgcacagaggcccagagctaattgttgcgcagaaagtggagttgggttttattacgtatttcacaggaagtgctagacagctccctcccatgtgatcattatggtccatggagaaactaaggcaaatgccagtttacctgagcatatgttacagacatgcataaaaacaggggacatttcaacactgttttcctggagacagcgagtaggaaggaggattcatcagaccaacctcaggcaggttggtggggggctggggtgagaagcgaagaaaaagcttctagagcaagcgtgttgtgcagtgttgatggaagttgggagcatgctctgggaaggaagtgcgttctttacaggtgaaacagcacacgtgtccattgaacttaactcattaggatggagacctctggagagatttagacatggaggaattgtaggtcaagcacacacaggaagaagagaagcagctgctcacacagcagaggggcaggtttcacgggtaatgagatgtagagtttaagaaacgcttattgcctgctgtaatataccctttgcacgtaattcatgtacaacaaagaactacacagggatttttgccctgtgaatatttaattgcaacttgcaaaacatgtcaagcaagtctcagactttccctggacaattttgacagtggtgaagatgtttggtctatgaaagtggtgggggatggggaggttcttaacgtatgcatctttgccagccctcgcgcttttgaatatgggttaataagggcattttgtggaagacttggagtgtaaaatgactctcccaggactcagttctatcactgcctgggtgacctggtgagggaaaggacctgctttcatgtcccttctatgccagtgattttccaaaatagagtgcataaagattatctacagcatacaaatttgcatatatttgaattcctgaaccaatgcgcactgcagagcctatgaatctgcattttaacacactgccctgataattctgacacaggaagtcctcaaactatgccttaagaaacacttctaggctgatgtgctgaggtatctatggagtatatgtatagataagcctagagctaattttccttcatagggaggaaaatgggattgatttgggagtaattagaatgttagactgcaatacaacccaatggtaagcataaatacgcaaatatggggtgacttattctatagttcatagaaatgtaaattatttttatttgtgcaaatatacaccatctcttctcacctgtgagttgtatctccacgtactaggacagtccatttttaatgttgacatttctgtggatgattatggctgttattaagttttcgattatataacttgttgcctaatggcttgaaaccagtactagccaagagtattcccaaaatgtgtgtctcaggtgaagtttgggtaactgtattgaagaaatccaaactttataacccttaactatttggtaatctagtcagtcggctctctcaggaacactggattcttcggttgaaagcaaagctgaaaatttaaaaagagtggttcgtttgggtatttcttttcttattattttaatttcattcttttttaatcaacatgaggtctcacttgttggccaggctagtctcaagtcctgggctccagtaatcctcccacctcaggctcctgagtagttgagattatgggcatgagccaaggtgcctgccgatttgatttttttttttttttttttttttttgagatggagtctcgatctgtcgcccaggctggagtgcagtggtgcgatcttggctcactgcaacctctgtctcttgggttcaagtgattctcatgctttagcctcctgagtagctgggactacaggtgtgtgccaccaagcctggctaattttttgtatttttggtagagatggggtttcaccatgttggccagcgtggtctcgaactcctgacctcaggtgatccacccaccttggccaccaaaggtgctgggattacagacatgagccaccacgcccagcctaaatttgatttttactgtattattgtttctctcatcatgacttgatgagaagtttgggcatatgtgttcaagttttctgttgcacataataactattagaaaacaccacccatctgagtaatttttgttttaatagccttaatcacgatgaagctttgtaatctgtaaagctttcgagccaggttagagaagtcagttacagagttccgcctctttgcactcaaatgcatacatgtaaaaaatggtcaaaatggatttggggtttgggcttgttcagctgtcaacatttgatagttttcctgagacttatccacgcgtaataccctgaagggtggtggtctgattgacgagtgagcaccttgcctgcctcttctttagggaaacctgtttgcatcctcttttctcatccctggttcctgttttgcaacctcatcctgaacatcctccacgcagtaggttttgtcctgctggcagcctttttctcttgttttcccatctagaaatctctcctttccaaacacctaaatctggtctaggtgaaactgtgattctttctagctaatgtcccacattttcatagtgctttctctcatgacttgcctcttgttgttttgtgcattgcctggattcctacagctcttacgataaggaacctgtgtttagcagtaattcatctgcaacagttgcctgcaatcagttttgtctttcccgctagtgtctaagtatgacaactgtatatgatgcttgcatatgttggatttgtgcttcatatttaaaaaaaaatattagatttctaatgcattcttttttcctgtgaatagttgatatgtcgtttggatacatatgttagagtgtcttgatatacataatactttatgagatacatgactaaccttgatacctgtttattttaacagactgatcatggtggagaattctaagagttgagccaggccacagagggcagatgggaacttaaggtggagggatctgtagctgaaatgcttgggagtttccaatcccagctccactgctcactagctctgtgaccttcaggaagttacatggcctctctgtgtctcagttttgtggtgacccacttgtcacagtttgcctgggactttcacagtttcaacactaagcatctgatgttcctgaaaccctctcagcttcgagcaaactgagatggttggttaccaccaggttatttctctactaacacaggagacaatagtaataatctgtaccacatggggttactatgaaataatttatgctaagtgctaagaaagtgctgagcaaaatttagctcttattgtatgaataggctaagttcaggtaacaaagaaggtacttaccatagacatgctagttaaagcaaaaataaagaaatagtcacttaactagtgtgtgtatgtcatatgtggtctatgtagtgtgtgtgtgtgtgtgtgttgtgtgtgtgtgtgtgtagtgcggtgtgtgtgatgtgtgtgtgctgaatgtgttacgtgtgtagtgggtatgttacgtgtgtggtgtgttatgtgtggtgtatgtgtggtgtgcatggtgtgtgtgtttggtatgtgtggtgtgtgtgtataatgtgatgcatgtgtggggcgtgtggtgtgcatgggatggtgtgtgtgggtggtatgtgtcatgtgtatggtgtgtatgcatatgtgatgtgactgtgtggtgtgatgtgtttgacgtgtggtgtgtatgtgtgtatgtagtatgtggtgtgtgtgtgtgtggtgtctgtggtgggatgtggggggaggtggggtgggagtgtagtagtgtgtgtgggttttgtacctccatgccaataataccctttcctgtgtgaaggacagctgacagagatggctacaacctgagtcagacctcagcaaagtatcaatgtgcttttcggaattctacatgtagtgaataaatattttttaaaaagttgctttctagttatatggtggttagcctctctttcaggtataaaagtaaggtttgaacacttttcattaaaatcactggagctgcaaaatctcccacatcttttctcaaccagtaacctttatttttatttctttctttttattttctgccacttgtccctctgcagacttaggcaccactcattgcaatatttctggagtctaatttctcagaattgtttaaaaggcacacatgtcttaaaaaaaaataaaacccaaggaataattcctacaggtgggatgtcaggcactgtggcagcctggggaagcatatatttggaaagggtgcatgtccataccatcctctcctgaaggtagttgtcaggagcttactcttgcctcatctgcttacaggaaactttccgagataattatccatccaaatcccaccacgccactcactttgacaagtacacacattgcttagagtgaggatcaaaagtttattacatgcacaaaggtttcagttgtttgataaggagcgtgtgtgtgtgtgtgtgtgtgtgtgtgtgtacatgtgagagagagagagagagagagagattcatgaatgaattgtacagactactcagttcccccatagttgctaaaactcatttgtctggcaaccatatgcaaaagaatgaaactggacccctacctctcaccatatacaaaaaaaatcaacttaagatggattaaagacttaaaggtaagacttcaaaatataaaaatcctagaagaaacctaggaaatactcttccagacattggcctagacaaataatttatgactatgtcctcaaaagcaaatgccacaaaaacaaaaattgacaattgggacctaattaaactaaagtgtttctgcacacagcaaaaaaaaaaaaaagaactatcaacagtaaacaacctacagaatgggaaaaaatatttgcaaactatgcacctgacaaagaactaatatccagaatctacaaggagttcgaacaacttaacaagcaaaaagcaaataacctcattaaaaaatgggcaaaggacatgaacagacacttctttaaaaaagatatacatgcaccaacaagcatatgaaaaaatgttcgacatcactaatcattagagaaatgcaaatcagaaccaaaatgagatgccatctcacaccagtcagaatggctattgttaaaaagtcaaaagaaaaaataacagatgttggcaaggctgcagatgaaaaggaatgtttatacacagttggtgggaatgcaaattagttaagcccctgtgtaaagtagtttggagatttctcacggaactaaaaatagaactaccattcgacccagcaaggccactagtcagcatatagccaaaggaaaataaatcgttcaaccaaaaagatacacacacttgtatgttcatcacaacattcttcacaatagcaatgacatggaatcaacctcggtgcccagcaatggtgaattggataaagaagatgtgctacatatacaccatgaaatacgacacagccataaaaaagaatgaaattatgttctttgcagcaacatggatgcagctggaggccattctcctgagcaaattaatgcaggaacagaaaaccaaataccacatgttctcacttgtaagtgagagctaacccttgggtacacatggacagaaaaacgggaacaatagactctagggtttcaaaaagtgtgaggggcaagtgttgaaatactacctatcaggtactacgctgctactcaggtgacaggatcactaaaagcccaaacctcagcatcacgctatatattcttgtaacaaacctgcacacgcacctaatgaatctaaaatttaaaaaaaaattaagtaaaactcattcattatctatagcaatctaagtagggaataattatcttcatcttacagaggagggaggggaagcacaaacaggtgaagtaacttggtcaaggtcaccatcatcttaagagatggtaattagtgtttgagctgctggcccactgaccccagagagctgctccctgtcacatcccctcaacacaaggagtggatctggggagaaatgccctcttctggccacactacattcccagaaactgttccctagtgggtattcctgcagtaagtgaactttctcattacagaaacactgcaaaaccaagtctcctaaccaaactgtcaactcttaatgatgtcttaaacatgacccagaaggcaaagctgaatcccgaaacttgaggctaacacaattatacgcaaaggcttacaatgtgggtaacaatgtatgcctcacgtctcctgccacatgctcacaaacccccaagtacgataatggtagatgggaaataatgtagaacttaaccctgaaaggtctgtgctcatgctctgtccctgccactccttgtctctctcctgaaccacatattcaaagtctttgagccttgttttcctaatctgtacataaggacagaacactgtgtcccatccgtctaacagaatcatcatgagccttcaaggaacgaatccacatcaagaccacaagaatgaagtgcaagatattattaatattcacaacagacacaaaataagacagcatataaaatgcagccccctgcttcatcaactttacctagaattaatatgctagctagaatattcattaaatatttaattaataaaactgctcattttagattttaaaaggctatttggagatgatttcaatgctctggttctcctaaaaagccatccaggaaagtctgaactcctgccatttttttccttaatgaatttcaccctaccaagaaggggaatccaagcattccatcgtcctttgcactgtgctcagagtttggacttttttttttccaaagaaggcattataacaatatatatttaaaagtctcactaaagcttatactagggaaaattggggaaatgtgtttttactgtttcttcgtgttcccttccccctacaaatagcttgagtaggatataatttccagagaaaaaaggtatcacaacctagctctgtaagcacgggctttgttaaaacatgatggtttactcagcacttatcactaagtctggcatttagtgtgtgcgcaaaaagtacctcttcaagagatgaatggatagatggataaatgggtgcataggtgaatgaatggatgggtgggtggatggacagatggatgcattgatgggtggatagatgggtggatgggtagacaggttaaataagtggatgaatgtgtgcatgggtggatggatagatggatgggtggttggtgaatggatggattgatgggtgtatgaatgggtggatagatgaatgagtaggtggatggatggatggatggttggttggatgggtaggtgaatggatggatggatggttggttggatgggtaggtgaatggatggatggatggttggttggatgggtaggtgaatggatggatggatggttggttggatgggtaggtgaatggatggatggatggttggatggatggatggatggttggtggatggatgggtagatgggtgaatggatgggtggtggatggagggatagatggtgtatgaatgggtggatggatgggtggatgggaagttgccagggtgtgagcatggtaataaaaaaagtggctataggtttcacttctctgagagttgctgagggatacagagaagttctggaattattgggactaatatagaacagtatgacagaaaaaaaattttctccctttcctccttacatcacaggacagtcagaaacattagaaccaagctttcaaatgagcacttcaagacctctcaacaagaataaaaatacaagtttctatttggtaccaaaaggttaacatttattgagtgcctcttctatgccaaacacagtgctttgtttttttctgtacattaactcatttaatcttcaaccttatgaagaaaagactgattgccatttatctggagctaaatgagattacactctctgttcaaaatcagatggtgaaaggtggctagagtggatatccagtagtttaatttttccaacatccctttttccaatctcctctgtaaacagaggcttcctctcatccttccacattcactgggatctggtggggctagcccttctctagacagaacagaggtcatgtgaccttgacctggttaaatatcttcagtcaaaaggatttaaagttgagcaaatgactcaaatctggccaatcagacaactccctcacttgtccccttacataatgccccagcccagtacatctaccagcacagaacggtgaggtccaaaccactgtacctgtattggaacactgactttattggtgggctcagtcttcatccagaatgtgtagtctatcccagctcagcatgctcattccctttgcaaatcaccagggggaaaaaaaggcacatgcttgtattggttttggttgtaaaagtttgggaacatcatttggacattgatgcctcaaatgtacgatagaatctgggtaacaagtctagaactcacagcagtaaatggcaaaagagttcatttaaatatctttttccaacaataatcccacatacatgcacaaagtaggtacagaactccactctggttttaaaccaagatcccaatgtaagatactaatgaaagaagcctaccccagaatctaactgagcagcccccagttatcacctgtggcaggatcctccgtgactattgcattattccgacctggaattggtacaactcaaagactctaatacaaacattttttctactttcagacagctggcatttcacaggaaacttcccaaacatctgctgagcaacctactgcttctctgacttcaccaattcccttctgaagagaattttatctcagcactgcaatgaggatagtgaacataaatatatataattactctacattaatataattagtctgtctttctcccagtccagaaatggttgtccatatttagctgtcagtggttggaattatttatgtccatttgttcaaggactaaaaatagattcattaaaaaaagaatgcagatattacccagaaaaggctctttcatcttttaaattctatttctccagtctgggttccattgcctgccttcttaggaattgagtcttgtaggttgaagagattagattcacacaaggcattctattcatttattccttttgatgaattaccagcaagctgacaagacaaagtactttggttgttccaaagctgacaacaaatgccatccccactgcagcattctgttcacccctccttctgtgcaggggtggggccatattcaagaaaaagtaggctcatttaggactatgcattcatgacgtcttcaataccacctagctcctttgactattttgaaatctcagacactccaaatattatacatatcactcctatccatagaaatcaaaatcaaaagtagctattagaagaaaattgtatataaatagcttctcatttgcaacttccagggaataaagcttttcttatggtttgtgtaactttactttgttggtctttatataatagctgtcacgttgaagctggtgtgctcagcactgcattattttttgaatagagcattttgctatattaacaaatcagtgaggtaaggatgagaatgtccattctataaatgggaacactgaggctaaagtttaaaaatatgcagctagtggttatagatatccagtcaagcaaacctagatttgaatcccatctctgcaactttctaattatgtggtcacgggtatcaactcacagcaatactgaggcagatacgatatccccaacttaaagataagaaaaccatggttcaaaattaagtaatttgtacagggccaactctacatgccaaatgcaggatggccaaatccatttgtctccaaaaacagtaatcttaactgacaccctttattacttccttgatgcaaaaaatgacttagttgcgatggaaacaagtatagcaattaatttaggcacagtgtgaaagagcttgcttgccaaccatgctttcagtggtgatattttgagaaagaggctgaggggatgctcctataggggtaagctggctctgggcagctttgagggcctagtatacctctattcttactagtcctaagtttgtacttctctatggggcagtagatcccaaccagctatcaagcagctacccaaaggccagtgtcattactcaaaccagaagagtagctctgtatgtataggtgtgtgtgtgtgtgtgtgtgtgtgtgtgtgtgacagacagagggagagagagagacagagggaatgcatgcaagtgctgtatatgacactgaaaagccagttgcctgttatttgaccttaggccagtacctgtcataaatccagtgcttatgaaatgtaaaggtttattcatatggcgtgcagcatttttaaagcataaaatctggagttagattgttcagggttgaatgccagctttatctccttctaactctgtgaccttggtcaaattgctgacctttactgtgcctcaacgttcttcaataaagaatgctgctgtatgtagagaatgaaaataactacagtaccttcctccaaggagatctatgatgcttagacgcaaggaacatttagaagtgtgactgagaagtaagtgcttagtaaagtctgttgttttttttcctttttttttttttgctcttattgttactaaggaacaagtactaagcctataagaggagtagcctcatgtgaacttgcaggaaccctccattctggaccccagatctttttttatgcacccctcatccatgctctaatagcgctggttcgcacgggcaccggcagagacatgttctcaatcctggcatgatgcaatgggagctctttgcagtgatcatcagcctctccgtcctcttaggcatggtcccctctccccagtcaggttgatatgaccttcaacaccagatggataatgccccaggcgggaggaaaggatgctctgggagagtagcctttaataagcattatcccttcctgatttatacagaggggagggtactgttgatatgcagtcttgctcatagattaccttcattctgactgcagccagcccgacaggggagggtgtgccgggcggcttgccaccctatctgtcatgtcgccgagggcagcagcaatgctgcctcttcctagagaaactttctactccatcaaccacaaaagtaatattgcaggtgcatgttcatggatctctccaacaaactccatcttcaggttcagtccttggatcaaggctgcagagaaagagaaaatgggacctacaggcacaggcagcacctccaagctcactctgatgagaggaaaatggacatcaagactcctcacataaaaaaggctagtggtaaggagtcaggaaattgagccagaacagatctagactaaagtatttggctattctcatattatttcttccagtatgtggcacaggctaagtgccacatcagatctctgagcctgtgcctgctatttctctttcacgccctattcttggggactgaatcgtgcccccccaaaaaatgtacatgtcaaagtcctaactcttagtacctaagaatgtaactgtatttggagatggacctttaaagaggtgattaggttaaggtgtggtcgtcagggttggccctaatcctatattactgttgtccttataagaagaggacatttggacacataaatgagtatgcccattctataaatgggaaccttgaggctgaataaggttaaaagacaccatgggcgcagcggcacagacaacaccgcaagaagccatctgcaagccaaaaagagaggcctcggagaaaccaaacctgctagcatcttcatcttggatttctagttcccaaaactatgagaaagtgaatatctaatgtttaagccactcatcctgtattactttgttaaggcagccctagcaaactaatacatcaacatgaagaccaggttttcttaaagtagttgagatttagataaactaaaactttaaagtctacttaaaatgtcaaagtgaaataaaaagaaaagttggtgtccagaagtggctactggacaacaaatgatggttgctttaaagggttgctgcttaagtgcaatggtatcgagttaagaacttccctaatgccaattctttcccaggatggtgcgaatgtgtgtttgtacatttgtaaaaataaatatggaataaattcttattatgtgtcaggcactgctcagctgctaagattgcaaagatcaataaaagattctccacggtctagtgagagaaatgttaaattttattgttagcatttgtttacatgcccacatgctataattagatgatctcatatttcttttacattgctatttcctccttaacccacattcaatcatcaaacactgcaataggtctattaaagcatatcaaacaccatgccaagcacactaatgtgcttcagggttctgtacttggccctgttgtattatacaatgacctggtaaagaatttggaatgcaacctaatgtattctatagagcatatgaagctgagaaaaatagttaatgttcaagaagacagaatcaggattcaaaaatattttgatctctgagaaaaataatccaagactacaaagttgacattgattcaggactacattctgcattcagaaaagaactggcagcttaagtttatggtgaggtggggaatgggagggcagcctggtttattggcatgaggacagacccagatcttcagttgtcccacatctattcctccttctctttcataatccatttgctgcacttcactccctcctgtttctttgcttgttcctctgtgatgctctgcaggagctccaagaccatgaccttggtcctccctccccacagtgttctgtttctcccggccaccctggctcagatgacaaagggctctgcctgaccacactgtatggtcccaatcgaaaacatacaaaccaggctatccagtcccctagaagagggcattgaggatagtgaaaggctgaaaatcaaaagccatggctgaatcaatggaaaatgaacactatgaaaagacaagacttatttgggtcaatagagctaacttcaaagttagtcggatcaccactgtgaggatgaggacttatatcattctgggaagtaatctcaatacgtaagagttataagaaaccaaagattagattcaatttaagaaaaaaagtactcaaaactttctttatcttgcatggtactgagctctctgttactggaagcgttcaagttgaggctgcaggaccatctgcagagtctttcaaagtggattattgcattgggtaggaggtgggtcagaatgacctctaatgttctaaatttaagattgtcttcttgtaacctagctgcagtatattttactcggagctagactggagtgtaaagtgcaagctcctatatatgagatcattttgccacctttttagagagcgagtgaaatttatacttagctcaaatgtcagttttaggtatccacagctgctgggtaggaaattcagatcctactgaagaaaatgaagggaacccagctgtctttgactcatcaccctcttgcgttggcaaggtcactgttaccttgcaattagcacttaccttcaaagaagagcaagctcatcatctgtgccatgctggataaaactctccataggcagaaaaagggccaagactttaaatggttagaatttgtgtgaattaagataacctttgatcttaatgggtgaccctaactgagcgtctctcacactcttgccccttctggctgtttggagccaagtccttgagattagggtccccttggactcagtgtgctggtctcctaagcatcaaatgaatgcatgctactaggaggaggatgtgcaatcactctacttgttaaactgcaagttttagcagaaggattttagagacctttccactcttggcccatatctctacaagtagggtggtggccacctctctttctgcctgcaaggctggatgcctgggaaccgagtgcatggggagagctctgggtgcagacttaggagccctgggcgctggccctgtctgtcccttcccacacccagccatgccatgtgggccatgcctttggtcccaatcagctcctgtcttagtgtctctctggggctgcttatagctcgggtgggacactcatctcctagcttttcctcacccttcctttcacagtcctgtagaacatctttaggctttggtttctttatctataaaatgtgggaaaagtaataaattccctgcctcaaggttgttggttagccaacatgggctatgactatcaggagaccatggtaattaatattgattgacaattataaaaagattcattattttaatttttttcctaaataatggcaactaaaattgagttattatataatgccaggctctagcccagagatattagagaatgcataacttaactcttttatagggatcattattatcccccattacagatgataaaactgctgcacagagaggttaagtacatatcccaaggtcacacagctagcaagtggcagggctgagttacgatcccacaactctctgctgtctaaggtgagttcaggccaagattttaaaaaacaaaaattggttgtaatagggttgatccccctcttattcttctgactcactgttgcctctatgttgccaaaaaaaaaaaaaccctgctgccatttttggttgaaacaactcctcccccaagtctctgtgatcttggcaagggtgccagactgagagctacaaagcgtcctgcagtctcatactgcttctcatctgtgacagtttcagaaatcagcgggacccacacctgtctcttttctttcaaagcagttagcagtaaagtggcaaatgcccccattcccacttcctatgctggctggggcttgttttctcatccatgtgttttaagatttcacaactccaaggccttttcagcgccttcagagtgcattccacaggcggagggttggcaggggagtgccagggagagggaaaaatcataggctttatccttgccacagcttagccttaagatctatgcccctgaaaaggtaaggcaacatctgtatgctgcagcaggagccaacctcctgccctcacgtttccttctgtctcaggacccctgtgctcaagacaacctcagcaggtctcaggaggggcacagggaaccaaggactagtttttacatttattgcatttcccccaagtccttgcctcctcatgccttccaaagccctccagccctgatcagaggcgcttgggttgggtgaactctgaacagtgaagggtgctatgtgcactccctgtcccctcacccacactcatttgaagagtggagtgtatacccattggatggtggtcatagtgcacccatgaacagggggtggatggtgcttgcattcccagtgtctgggtgggcattacaagaagctccccagatgccaggaccagggaggtacggctcatgaatcccagtggcctcagccaaaacgtccttcttggcagtcatgggtgggtgtatctgtgtgtgaatttccaatcatcaggcagacgtcgtggaccgaaagcaaggctcctcattcatgtgaaagattgggggaggacaactttgggaggccaaggcgggcacatcacgaggtcaggagtttgagaccagcctggccaacttactgaaaccccatctctactaaaaatacaaaatattagctgggtatggtggtgggcacctgtaatcccagctactcgggaggctgaggcaggagaattacttgaacccgggaggcggaggttgcagtgagccaagatcacaccactgcactacagcctgagtgacagcacgagactccatctcaaaaaaaaaaagatgggggatggcagaccctctatttccctctatttcctcacctcctcagcaaccaagcagaacacgtccagaattaatgacatcctcacgtcaactacttaatcttgaatgctggataaaaggtgttgaattttatggcatttttaaaccacactatttgacccccttaaataaaaatattttcacctctggaatgccttcatcacctcctcctcccactgcacgactgagctattccagttcttctcaagctcactcctaacattcaccccacctaccccacaacctgtagcctccactcatctccctaaaactctgctctcttcctcaaacaccttcagtcatttcctgttgcttttagttaaaggaatccaaagtgtcaaactcttttcctgtgagtcaaagcctttccccatctggcccctccagtccttccaaatggaatgtccatgacttccctatagggatgttttcttttaattcctgcatgcatgtgtcaggaggagtgttggatgtctgaaaacggctttactgaggacttggcttggaaggaatttggaaagaggggcaggatccaccttgtgtagaagtggcaggacatcgtccaggcctgtgcccatcaggaatgagtacctgctacaggagaggggcctcttgcttgcttgggcggggcagtgagtcattcagagctgcacgtatgtgactgcgtctctctgtgggagctcagtaagtgctctcgcattaatatggaagtcaataccaccaggatgggagaaggagaaagggtgaagtacagggaagcacatcaaacactcggagaagtggtttgtgcagtttaaaagcaacgatacctgtagatttcataatacaaagagctgaatgtaaaaccacacagaacatcttcttacctgctagagatcagcagggaaggaatcaggaagctttatgggggctcggactataaaaggctgagaaatactgcaagttagctggaaaaaactttatgataggattaactattttggagagtttgagttcaaatctcagattgttacttaatccccaagcattttttagctctgaccttggaaaagttacttagactttcaccatttgggattcttactcatgggaacatgtttggttttaatctgtgtgatgagaaaaacaacagccaccacttcttagggctgctgaggataaaattagataacgcttgtaaagcacttggctacagctttggcccacagtaagtgttcaatgtatcagtaaatcttcggtgatggcatcatgttattaatattgattgaatcaactttcaaacagcagtgacaccttatggctgggagctgcctctcaatgcatttgcctctctttccgctgtagttgctgctgccacctctcccaccctctgcagtctctctgcacttgtcaattgcctggaagcactttcatctagaagtagatgaggaataacttccaggaaaggagaaaggcatcctgcactgtatcttcgagtatcctagcctggcctcttctggcaactgcgtcgcatataccctttgctcttaactctaagatgactttttcgtgtttttcaaaggaaacatcctataccctgttgttgccttgatccaaagaatcttctatcagcacgatgggactgcatccctgggaatacagctttatgaattaagaaatggaaaaggatgggagaatgtacttaaaaagacaaaacctccctgaagtcacagcatttctgacatcactctatataggtcttcttcgggcccctccagtcccaaagaacagcaacctttctggtccctccgggtgcttagagccctcaagaaggcaacactgtttgtattccacagaaggggctgcgagtcgcctccaaatcccaggacctggctccagggatcaatatccagtcctgttggcaaacgacctttccatccccctcatcgaatgcatcactcagcatgccgtgcagagctggggggtggggggagcctgcttattccctctctggacactgactaatcaccaccattaggcccacagtcacatgtgacacggaaacgcaatgaggccccggctcctatttaatgaaggcaggctcctggcactgcacagctgcagcgttcaaggaatgccgagggcctcgcccacgtggccagcccttaccctccacactcagtaacccttcccagaattaattagaaagggtcctgggagcctaatggatagtatggcctcgtgtgtacggagtgaagaaaaagcaaataaacacgctgccctcatgcatggagcactggacgatgaataaaccctttgacagatgcattctcagtctttggacagttctgccggctaggcgcatcatgaccaccaccttacaggtgggcaggcagagaggcagagcgggacgcaaacggtgcagtagggaatgtaagtgctggtgttgtatccacagaaatccactgctcaactctcccaataggctagttggggggactctaatcccaaacacagttcccacactggcttcctgaagctcagagtaacactgttagtgagcggtctaggttaactattaccctgttccttttggattttgcccaaggctagctctgcagttacgttcttccagggaaccacaggggtagacgctggctggtttccaaacgttatcggagggtgcctttaacggccaaagttaacactggaaccctcagctactcgctgaagcaagaagcctcagtataaccaagtcatatttctgtcatgggcaaaatttaatgttgaagacacccgagacgcctcctctatttttggcatcaacctgctactgtaatttaattatcaagggagaaaattaggggacgagattagcagagaaaagggtctctcacgtacagttccacactgaaaagatttcctgcaaaacacttgcagacacccagcaagtctcagaggcgacactttccccatttcttcagccatctctgtcgactcacccagcacaaacacacttggacccctgggcagccaggtcggctcaagcaaaccacacatggattcccttccatcttccacctcatcaactctcctcttgttggagaatctttattaccagggtggatgcaagaggcagagagagcccagctgggattgtgggtccaggtgcagttttctcttctggctgttcaaaaaaatcctattttgacttgaaactggcctaaatttcctctggaattgatcgtgagagggcacatatgaaaccccaccaagccattcttaaggagccattcttctcattacctccgcctttgaggatgccaggctgaccaagggctccactcatcagcccctctgctcctcagctctgaaattaaccagccttccctttctgccttcttcatgaaccacctgctgttctccaaagtgttaggtggcagctgcgcacacccagggaaatagatttccagcctcactgtgatattgctttaggagggcctgtgccacagtctgcagccttggtgtgtacgggattagacaacacgcatcctgacaaacagaatcagccctttcccatgcagagccttcctcctcatgcattttttgtccatccactgatgctcccaattgtgagtgattgcgtgcggttacttttatgtgcatgatgaaaagtgcaggaaaaaaagggggacagaaacataacgagataaagccagacaaatcgttcatagcagatagatctcaaataattgcaagccagaaacactttcaacaaaaggagtatatccaagagggaattcatctgttgacacctttattcatttgtgcatacattcacttaaaataaatacttattggtgatcttccaggtaccaggcactatgctgaatcgaggggggcacagcagacaataactgttctcactaggcttaccatcttgtggcagatgctgacatatggccagatccttagtgtcctctgtgttgaatgctatgatctttgctatcctatggagaggatcaggaaagccttccacaagggagccaggtctaagatgaagtcagaaagatcagtaggagtaagccatgtgagaagggtgtgtgcatgtgcttgcatgtgtgcacatgtgggtgtggatgggtgtgcatgggtgcatatccacgtgcatccttctgctgaaggtgggagctagagaaaggggtaaaagatagtaaatgtagagattcgaggcaaaggatttctgtaggaatacaataagaaaggagataagcaatggccagatcacgcaatgctttgtaagctatgactcttgagcatggggaacagagaacaggggagtaggtaagctcactaaggagagaggctaaattgtgaaaaaggaaggggaaatcggctagcccagtttaagggactgagtcacaccagtctttaaaagctcatcaagggaagaacccaaaaaagaggccgagggcgagcagccagaggttaagaagaagccgtatttattgaatgtttactctcagccaagcaccttgtatgtgttacttcctttaatccataccgaattctaggaagtaggcactatgttaattcatacattataaatgaggaaactgaggcacagagcggtgaagtagcttgcccaggtcacagagctagtgattagcagagccaggctttgaatcccggtagaatgatgggagcctgtgctcttggaagtccgttccgtacaggggagcatacagaacgagactctacagttcaaaagaactgcagtgaacagtcacagattcatgaaaccctggtcaaagacgggccccagaaaccactctctcatttccaaatgaggacactaaagaccagccctgaatctcagaagatgatctggaacctctcctctctcaagtgctttcccatctttggttataagcaaaagaataaacacatttttcagaatccacaaaagtcatctttgaggaaaaagttggctactgtcctagagctggttcaaatccccagtcgaagaagcccaggaagccagccaagagacccaatccctgcccctcacacatacccccggctctgctccaaagctggggttcccgaagcaattcctccagcaaccttggggtgcattctttcacacctctggcaggatggattctgattcatgtcacatcgttatttcatgtctgcattttgtcccctcctgagatggttggcccttcaagccagggaaccacgttctcagggcctcctctatggtcttcgctagctctattgcagtaggtacttcatacaagtttgcggagtaaacaagggacccacgcaccccggagggacagtcacagatgatttcctctcattccttccaaagcacaaggtatctggcttctggacagagctctgaaaaggagtggcagctgctcagtgatgtagcaccgtcattggagagggagaaacaaaaattcagtctctctaaaatagatgataaagggtcagggtttcactcttggccaaggtgggacaccgcctccccgctggaaagctctgccctgtgagctggtctctgccatcttcttccctctcccaatcaggagcatcacctgtcatcgggcttcacgtttactgaacagtgtgcaaccagtgatatcttcgtcttctagcatgttagagacatttactcaggacttctctaaattagctgagagatgtgtgcaagactgcctactggtagacagcttcataatggttagacagcctgccaagggaaggcttcttctcaaagtaacttgcaaattagggcactgtgatggctcaatagtcacctgcttccaatggctgcctgtagccaagcaagaggtgagccaagtcgttgacagtcagtaggagttactgcttagcatgtgaagctacaagatgctcaccggcaaggggcttgtggaaaggaaagacagccctgttctctgccctcatgagttgcgactgaaagctgaggtttctgcctttgcctcgctctggagacaccagcccgagattcgacctggggaagtgtgtgagaacctgtacaccctttagttcttgacttgctgtgtgttttcaagtgacttacctagattctctgggaaagctgaggaggagaacaccatacctactttgtacttggtcaatgcctttgaaaattttcccgcattttaaatgttaaagttctttggaaggaggcagtgtgtttacagagacaagcaagaagcagtagctcatatttgacagtgtgaaaatgactaacaatcaaatttgctgagtagccagtccgctaaagaacatcgtatcctgacgccctttctgcccgacacacagacctctgccctctccattcttacagtctgttcttgcaggaatgagccacggcctccctccccttgtcctctgctgatagacttcaatgccaggagcttttcatctaacatcagacagcatcataggcatcatataaaaaggaagctgggagaacacaacacaacgccaggcatttaccagctaacactttgcccacattcctccctgcatagcccctggcatgtggggttctgtagagtacaggattaggggtgcccatactgtggttcacttgtcctacccccttgcattctttcctctgcctatgttgtgggctgtagcattttaatgccacaaaaggaaatttacagattttttaaaaaatctacttaacagcagtctcctcttggagatgtaaatattcataaacatatcaactcttccagacccatcacaaatagaactgccagtgacacccctgctgccttaggcattgttctaataagttaggagccggggagtggaaggggatatttttaactttacaatttttttttttttcaaaagccattttaaagtgccctgctgggaatggagctggaaagaagctgttttctggaaacagagaaggcttcaaacagagctgtgggtcagacctgaaacggtgattgagacaaggtgatcatatcttgcatttccatcacacagacctcatggaggaaactcaggagaacaaaatctgaacatggcttcacgtggccccgtgtggaaatatgtgtcaccttctccacagatggggctgcctcagcctaagcagcacatgccacttttaggggaaaccccagagggttggcaggacaagatagagccatgagtgttcctctgagttcattcagacagtcactgggggcatttcttcatcgtgatgcagctattcatactatggcttctcagctggtgtagccgcgattgcattatctgggcataagtctttgataaatatgtttccttgattcggttgttatttattattcaataattgtcctattaaacttaaattaatggggtatttgggatccattcctgaatgcttcttccacttgtttctgtcagggaattctgccggctctttaataacacccagctgtggatggcactgcggcccacgtgctccagctgaggtctcccgcagctgtacacagacagcctggcgactgctggccgtgggtcactgtccatccatcactccggctacacttctccacccctcctccgtctctctgccacttccatccccagcccactcctcagggagcagcttgaaagattacagctcagaagcagacagggtgggaaaaggagaaaggatttgagagaaaatagtttcatgagaagacagataacagagttgttgaggctgtgttaattaaaaagcagcaatttgtctgagttctgaatgtgaagaatcccctgggagatgttagccaggcttcctctgagagccagacgccctccatttctatctggcacatgctatggccagggcactgcgagagggtttctgccctatttgtccttgtccagaaactgaggattcctggaggcccaaggccacagtgcccactgccttcctgccccaccctgcccagacactctcatcgggcttgaggaatcgggtaagacgcatgcatggcttccccagatggaatgtcctgctgattccctatgggatgctaactcccctactaatacttacaaaaaacttgtcctaggccaggcaatttcataggagctttgcataattaatgcatgttaatttttacaacaatcccatgagggatgtactcttattatctccatcttatcagagaagaaactgagacacaggcgtgcattaactcaatcgacaaatagtaacgttgagtttcaaatacaagcagacggactagagagcagttctgattaaccactgtgctgcattggccatcacaaggactattgactgcattaggagagacgcctaaaaccccgtatgagaatgcagccaactcatcataccacttagcgccagaaactacacgctctaaatagacagagagcacctactggataaagagctgttctcagtgtattgcaggttaattaatcttgtgactttgtgttgccttgagaagagatgaaagtctctctttgtctgtgccacttacttacttagaaacaaaacaataaaacatttttttctatgggttcatggttcttactgacaagataccccagaagaaagaactatacagtactagatagagctgatacagagagatgctttgctgttatgccccagagagacactgtctttcaagattgaggtctggaactctgtcttctcctgaattactctaagctatggctctttgaaggtatttaggacatgtttcccagaatgccactgtacataatgtgcattttgaccataaagtgccaagcaagctagtatcattaataaattcagtcagtttgaaagtctagtcaatattactttacaaaagctcaataacagataaatgttttccattgattcaagactagcagcttcattaagcattactatttatacaaaaatatttaccaaaaacctgctatgtggcagacttcactcttagcactatggatacagcaggaaatggcacaaatatccctgcccctgtggggtttacaatctagctgttttccttcaaatatggaacttcctgtgagtgtaacattggattctatgtgattttcagatttccaagactattaattacataaaaaggaacttacgcatcagcaagggaagcccacagccataatctgaacataacctactcaggtcagttcctattgctttagaagactcagtggcaactggaattgtcaccagggaggagaatgatctgtctactgagcaagctgtctcttatcgcgggcagcctggggtagtggagtgagccctggacttggaattggaagatctgacacacctgacctcccactcactaatcacgtgacctttcagtaagcaacttgacttctatggcccttagtgtcttcgtctgtaaaatgaggaagaataatacccatcacatctatttgaatgttaaaaaatccaaagcaaagcaaaacaaaagagaagttgatcgcagatgaggaaatgcttggaattcatgaaattgcatgtaaatgtgaagtgctaatatcaatgacatgaggtgtacatagagtgtgataaatatgggcagtcttataatctgatttgtaacccgtcaccgtgcaggacagagtcctcctggaagctggtttcactcccgtgctgtgctctccacctgtgagggcttctttatgtgtcagctcagctaggctgaacggcagcccccagaatccacattctagtgtatttccagttagctgggctgccggggagaccccctcaggagggtgggagggcagtagctgcctctctagcatgcatgcctcttctctcagttattcagccaaacgctgatctaggtgctcctgtacaaggattttgtagctaaggtggaaatccctcaccagttgactttaaattaatccaaagggagattgtcttctgtgggcatgacttaacaagttgagagtctgtaaatgagcttagcccttccctgagggagagattctaaacagcccctgggccagcacagctctccttcttccaatccttccttcctggctgccacttttagacactcagctttagctcctgcccattctagtttgttcatggtcttcctctcctgactgtccaccctaagaactttggtcttgtgtagccatcatctgcaatggggtaaaccattccttgcagtaactttattcatatacacatacaccttctctgattgtgctactctgcttgaaccctggcagagacacatcctaccttgcttgtccaggtaatgagcttgcctgtaatgagcaaattatttctacccatgggtgttcttatggttaaagaaaagttgacctcagtttccaagtccctttggaagacacaagcatctggcacattacatgctgggggagtggtctgatgaaatgagccaatttataatgtaaaaatcaataaggaataatgaggtggagcccagggaggacttgctttggagtcctaatttccatgtcctaccactcagaaccatgccatgggctcaccatttcctggatgtaggcctcccttcttaggatttagtttcacattgcagtgtaaaactaaatggtctaccagtttcttcttcttcttccttttttttttttttcagtgcattttgtcctgaacaatcaagatagatggccagctcaggtaagtttgtgcaacaatcccagagaaagaagctctaaatcaatctattggggaaatattaatgctctcattaggaggcttaattattcacatcagcctctgcttcttttcgtgacagtaattccatttctgacttcagagcaattgctcttctcaaacttgcgagacacccaacaggtgctctctgtccccagaatgttaaaatattttgcatacagccagaagagatccatctcagaccagccttgcctcctcctgtccctcctccatgtgtgtacatacacacacacacacacacacacacacacctctcaaagcttatgccctctgaatattcagaccaaagctcataacttctcccatgcacactcagacttacattcccatctttttcccattcggactaataacaatggaaacaaacccacacatattgatttctctgtgccaagcactgtttaaaatgctttaaatatatcaacgggtgtctagcgtctgtgaagtagtactattttattacccgtattttaccaacaggggaactgagacacagatgatctgcatcttgcctgaagtctcccaaccgaaaaaaggaagagtgaagcagttagagtctgcacccagacattccagggctgcagcccctgagcttcatcattaaagcaccccttcctgttcagggtactcactacactatgcttctcttctgcatgccttccaggaggttttgctgggtttttgtttgtttgtttgtttgttttttagccctctaccattctcacttgcctgccccactcctcggttcacacatctccccagcagcacatggctatctcttgatgaccattgggaaagaaggcatcatgtcgacataggacaagactggcattctgtattttttcttgtaagcctctccccacaaccataacacaaagctcaaatgtcttctaggcagcccaagcccttcagcatcctcccactgacaccgcacagaagacaacatttcaaatcctgtacaaggattctgtggtgttcctctctccaccgcccaagcctgcattttccagatggacagctctgctgcaggcacttcagtatcagaagcaaatataccccaaacagctttttgtcatgcacttgtctttccctagagctctgcctcaccttacagagtcagcggggaggagataaacccccaggggttcaacaaagcaaagcttctttagaatttgtggggatttcaattctggctaaaccaccaggttcataccctcaggggacatcacaaagagatttgaagattttatactaaggcagtttttttccccctttgattaaaatacaccaaaaacactgttctgatgagtaggacattaattgaataccctatttccaaataaactaagggttttggagagttggagaattatagttaggacgaataatgatgagtttcaaatacatgaagagctctccagctaaaattaaaataaccagcaactaaatcaagtgaaacagaccagcattatagaataatcatttgaggtcactccattattcaataaacatattttttaacctgagtctatggtgtgcctgtcactgtgctagaaactatacttgatgaacaggactaaagaggtcactgccctcatagagcttagatttgggcagaatgctgggaagcatatcttgacactgtctgcaggagacttcatgtccacgtgcttcatactttaggggacatctgcccttcaccgccagcccagtgtcccttattttgtccatggcacctggatgttgcctttagagagcaacctctatgtccagatcagttctgctggctctggagccaggcatgtgggccagtccctttgagaacactgtgtgtccttggggatagtgattgtttcccagatgagcaggtggccaaagtcaagcaatgagagccacccagccacatgagactttgactcctggattttccaaatggttggaagtgagccatgatctgctagacgccagcacatggggaacctgccaagactgagggcaacagagtggaaagcagaggcctgagcccagggatggagaggatcctaattacaccatttgagcccctgaatccagttattctgaagtcagttcttcttagagacttttgagatatctgaattaaacctccctcactttttcactcccttgagtcattttgaggtggtattctattcattgcaaccacaacaggtcttgactaacaacagttaagaatttcattcattttcagctggcctttgaacaggaacatctccatctgctgtgtttatgacacatcttggttggactcccagttcatcattcaccagatttgggaccctgatccttagttctttcacctctacactggtgataatgtcagagccttctttctaggtttgctgaaaaatgccttgagctcatgatggagactgcttggcacagtgcctggcacatggtaagccctcaacgcatggcgtgcattgtgattatgatgatcacggtcattatcataatcatcatcataaacatcccaaaccctctcttggctccatgcccttccctcttgtaactgccttgtttctctgctctctttaacaacaaagctcttcgtaaaagatcacatatgctctctgatttgcactttttactttctgtcccctggtttccatccactccagtcaggctctgttcccattttgcgattgaaatttctgttgtcaagatcacctaggaattcccccatgcaaaaaacaatgatgaaatttcctcttattctattcagtgccttttagcacagatgactccttcttcctcttgaagcacttttctcaactggcttctgggaaagcacgctccaggcttttcttcgacctaacctccatcgtctgtctcagtcttggctggttgttcctcctcatccagatcagctctccctccctgcctcatctcactgagttcgtgcccaggaaaaccactcattcctaatggctttgggatacacacctctattcccaatccctcttctcaagtccttcaatctaaccatccacatggcaacttcacttggatgtccaacagcgcccttaaatatgcataatgagcaaaactgacttttccttttcaccaccactctcttcccctgaaatctgctccctttcatggggtctcaatcttggtaaacaccattgccattcttactttctcaggctaaaaccctagatgtcatctttgattcttctcttttcctggtcacccttcagcaggcactgtaggctctggcttcaggtttattccaaatatgagtctatatcattttccccacctttcccacctgagtccaggcataggaccactgcagcaggctctgactggccctgctctcatcatgttggccctcttatacattgacagatcagctcatacttctgtcacctcaaaacctctggtggctttctattatacctgtcatcaaacccaaacttcttaaaaagtcagatggcatttatgtcatatgtggcacctgcacccttttctaacagtcacttgcagactctatctccttgtctgtcccttgtcactgtaccccagccacactcagtgtgcaccaggagtctccagaagtgccacactggaaccaggctcagagcttttgttgctgctgttacttttgcctggaacactgctctcccagggctgctcctcacagaggcttctcattattaacttcatctatttgttgtctgcctttactggttgggcacatcatcacaggggcatagacgaaacacttacaggaatttaaaatcaacaggcaaagatgatttcgatttaaccatcagaaatggggacacttctcagtctgctctctcctcataaagccttagagagtccaactgcctcttctcagcctagtgtggagacctgaagttgagaaacatacttccaagtggcgagatcctgtgaaggagctgcctttactatacaatgctgcctccatgatacttccaagtggtgagaccccatgaaggagccacctctactgtacaatgctgcctccatgatacttccaagtggtgagactccatgagggagccgcctctaccatataatgctgcctccatgatacttccaagtggtgagaccccacgagggagcacctctatcgtacaatgctgcctccatgatacttccaagtagtgagactccatgagggagccacctctactgtacaatgctgcctccatgatacttccaagtggtgagactccatgagggagccgcctctaccgtacaatgctgcctccatgatacttccaagtggtgagaccccatgagggagccgcctctaccatataatgctgcctccatgatacttccaagtggtgagactccatgagggagccacctctaccatataatgctgcctccatgatacttccaagtggtgagaccccatgagggagccacctctatcatacaatgcagcctccatgatacttccaagtagtgagactccatgagggagccacctctactgtacaatgctgcctccatgatacttccaagtggtgagaccccatgagggagacgcctctaccgtataatgctgcctctatgatacttccaagtggtgagacttcatgagggagccgcctctaccgtacaatgctgcctccatgatacttccaagtggtgagaccccatgagggagacgcctctaccgtataatgctgcctctatgatacttccaagtagtgagactccatgagggagccgcctctaccgtacaatgctgcctccatgatacttccaagtggtgagactccatgagggagccgcctctaccatacaatgctgcctccatgatacttccaagtggtgagaccccatgagggagccacctctatcgtacaatgctgcctccatgatacttccaagtagtgagactccatgagggagccacctctactgtacaatgctgcctccatgatacttccaagtggtgagactccatgagggagccgcctctaccgtataatgctgcctccatggtacttccaagtggtgagaccccgtgagggagacgcctctactgtacaatgctgcctccatgatacttccaagtggtgagaccccatgagggagccacctctaccatacaatgctgcctccatgataattccaagtggtgagactccatgagggagccgcctctaccgtataatgctgcctccatggtaaaagagagaatatttaaatatttggtgttcaaatgactcaaaaggcccagttatcatggattgggaggaagggaagcaaaacaaactgggagatggagggggacagagaatgatttataaatgattgttattctatatgtgatatctaataaaaagtcatccgtggtcattcctaaacatctgatgtaaaattgattgtaatttcataaactactgtgtggccctaaaaggaaaaatgagtgactgagaggctcagtgaacatgaatacagaatgattagcttcataaacatctgaatccatacctgcttagagtctctggggaattggaaatcaatcaggtaagccagatcaatgctaaatctctccccagattcagtaaatctctaatcgtggagagaatgtctctttttatgaaaaccaaaataaaccaggacacatttaaatctactgtaaaattaactagttatttcagaattccccaaaattaaaagtctggggaagaaagtctatttttacagatgaagcaacattcctccaaactcagtttaactgaactttatcctacatctatgatgttattacctgattaattcagcctgattctaatcacatttaatctctgccaagccctcaagcatgtgcagtactcagatggttttctattaatttttaatcactatgtatggttccgtaagtgtaaaatctcattcatggacattgttttctttgtgaaacagattctcaactcctcgaggggagagacattaggtggcttacttatttatttaatttatttattttgagacggaattttgctcttgttgcccaggctggagtgcaatgatgcaatcttggctcaccacaacctccgccttccgggttcaagtgattctcctgcctcagcctcccgagtagctgggattacaggcatgcaccaccacacctggctaattttgtattttttagtagagacggggtttctccatgttggtcaggctggtctcgaactcccgacctcaggttatccacccgccttggcctccaaagtgctgggattacaggcgtgagctgctgtgcctggctaggtcgcttactcttttatcctttgtctttaattttatttgaccagggttctgttccttagatgtaggtaggtaggatcacatgtgaaatacttggctccagagtctaagggaatacctcttacataacctctgttgccaggagggccaatgtagatcatagattggcatggggtttgattcagaattgtccaaggccaaaggctgctggatttggtgcccactcccttaatcaggtcagctggcggctcttcgactgattgcccagttccagtctctgcccttcctgtcctgctctgtgccttggagactctgctgtctgcagataccaccaccccagcttcccttgccttctgcttctgggtgggtgtggccagtagaattctccagtaggacatgggaggtggaggacagagtttgaggtcctatcacccagctcctgtcaggcagctccacttgcaaagctatagcctgcccctgtccctagcaactggtctgctatttgcccttttttcaaaggacagaaatgactcccactgttgctagtcaccatcacatgcgtcctgtgaactctgcccacacctctgtcatcgtcccttcattgcacatccttctgttcaatccattgggttttctgcatgaccctctcaagtccttagtactctcaggggcacaatgaggggcaccagacaaaaatgtgtgaactcctgcagtgccagagacaaagttccaggtgtttgcaatataaaaaattaattaaacaccctatcttttctaaccctgtacatctgttttctttagaacacatcataatatactttatttttactagtgcgttatctgccttccgcactagactaggaatacctccagggctagagctatgtctgttttactcaatgtatttccagctcctggccagtacctggcacagagcttgtttacatttgtaaagctcttggagaattttaaactgagtggtaaagccaggcaaataattaactataatataatgtgacaaatgtttgaaagtagcattattaaagttatcaaaccatagaggaggaggaagggtttgattcttccttggttgcgtaaagacttcaggaaagaaatcaccgagaggtgacacatgacgtggaatttaaaggatgagtgaagttccccagaaagaaagtagcaaaaggagagcaattccaggtacaaacagcatcagagatgcaggagagcatggtgtgtttgcatgtttgcagactggggcgggggcacgcggggtgcatcctgatacacacagagacatggggattccagcaagagctcagataaatggggcgggcaggtgtcacatcgagcatgccacccactcctcaaccagttagggactctctccctgtgtccacttctgttttatgatgcacctcctagagcctagagtatcagaaagcagctagtcccgctcccatcagggcagctctggagggaccaggcatctcggagcacgctggctaaatcaggtagtgagcgcggctccccacgcctgggttttcgcttctcctctgtgcttctcggcacctcccagtagaggccagtagtctcatttacactttttgcccagcttaacatcaactgctgagagtctatacataacctaagtattttaaggataaaaataatctggcaagatgactttacagtcaatagatagaagtaacttgctcttcaggagaaaaatgaagcctgaagtgtgaagatgcccacagggagggttccaagcttgcctcactgacctaggctgccgccactgggctggtaactaaaccagaaaatgagaattccagggaaactttgctctaagcttcaggcttatggtaactttgcaaggacctttatcttttgtcattgaaacaaatcaaattttcctccaggactaccttgtggatttccagcaggctgactccatggtccgaacattgattttgtgtgttatcattcagagatcaaggcagtaatagcacagaccagtactagggacctatctagaattgtattgccaccttgacatttcttatcttacagataaagctcaaggaagacatctaaagggtttctggtcccagagcctttgtactcaaaggatctgcggattctttcatctggtggttcttagagtgtgatccacaaatctctaagactgcccaagaccttttagggaggtcagaactattgtcaggataacattaggacattatttgccttcttcactgtgttgatatttgcactgatggtgcaaaagcagtggtgggtaagatggcaggagcctcaggcatggacaaccccagcacacaaagcccattgcatgagtagtcactgcactcttcacctccgcacgcttgcagggaaacccaaacgccagtttcacttaagaatgccctcattaaacaaagaaacacttgattttattacatttcaaatcttgagtacacatttttaaaactttgcctggtgagatggaagggtcacccagaacacttctgctgcacaaccaagtagtatgattgtctcaagaaaacattcttttgtttgagttgcaagctgagctagccactgttttcatggagcacaatatgtgcttgaaagaaggatggacgatgtgttattattagacttgggtacttggcagccattttctcaaaagggaatgaaattagtcagttgtttcatggaaaccaactcacagtatccactgccagtgttcaaatgtgagctttcaggtaaagaatagaattttggaaaactttaatcagctactattatctttacagctgttgatactccatcttttctagtgagatctgtggtgatgttcaggcaaaagacaggatttcaaattctagatttgccacaaactttccatcagatattttaaggccgttcctttctctggatctcatgctactaaacttcaaaaaatggaattagaataaaggattttttaggtcacttccaaatcttattctcctctccctctccctctccctctccctctccttctccctctccctctccctccccctccacctccttctccccatcccctcaggattcacagcttctaagcttctaattcaggaagagtatttactactggtgtaaagagagagaacacagaagctgttagaagggaatgattccttctgtccttcattttcactgagcactgtaccagcagaacctctaaaatataagcatctgacacaatagccgcatgctgttacatatagtcacatgtagaagacagttctccacccttaaaacacacctcagtgcctgcgtgcaggtctaggctcagacctgtctgtcccacgctcaggacaaagtcacccctaaggtcagagagagacagtaggtgcaggcagggtgtggaggggaggggcagccaccaggccttggctccccaggtccctgctcctactgtggctgcatgacaggacctgccaggtgagaaaacaggcctcttattgggaaggcaggtgcctcattcaagattctacgttttcctgaagggtgctgagaaagccttagagcaacttagaagtcaagcccacctggagggctgggaacgctgcacacagcagcccctggctaaacactgctgactgggcagctggctgcatgcagagatgacaggctcaccaaaccctacgtgggcatcagccagtgggcccattgcctccagggctgcagagactgcttttccaagtttgcccccctcaacaagatcacttttgcctccacttaacttttgctatagttgaatttccttaaagtgtgtctaagagggatgcgagctaaagaaagaaaaaggataatagtttttgtttgattttattttcatgtttatttttagtgttggggagtgtccctatgttgctcaggctggtcttgaactcctgggtttaagcagtcctcctgcctgagcctcccaaactgctaggattacaagagtgtatcaccacacccaagaagaatgacagttttgtttgaagctgatcattttggttgactgcaagaagataatcctttgtgttaatttcttctctgtttaaaactgtctacgtctccaaaaagctggggaactattggcagactccaaaggattctacctcttcctcttcctttcctttacagtctgcaaagcctgcagtcacaaagaactaattctgcagtggatgtgttttgcttcctcacatctggatatggggagaagggaagtgggaagtggggatggggctgcaggcatgggaagagccctggagatggaaaggaaatatccttgtgggactaaattgcattcaccataataaactatcaccttgaaatgagtgttccaattgagttttgatgtaaacactaatattttcttcactctgctattctcttctgagctctcatgtatatttcaccacgtgtcctacctagtcttacactcatacatcaaaggattgagggcaaggaacctgattttgaaaacattattcttttaaagatttatcctctcatcttgaccacctccttagctggaagggagaagttctccataatttattttaatgtgctatgcaaaagggatcttctcatctcttctttcaaaaacttttccgcaagtcagattagacagggccctcagttccatttcgtttgttttccatccaagcacacttaagtgcatgcataaatgggacactaaacagaaattgaggtgggggtgggggctgaaaagtttgagaatttcatggaaacttttgaggaagcccattggatgggggcatagggtcttgtttagctacaaaaggtgacaccaactttggttttagaataaatttcctagcactgggtgtaaagacacctttcctagtgaaactgttagcctggcctaagctctgtgtcattccaagggtatatgttgtgctaatctccattatgctcaaagctgcaagtttccagagtccacagtgtcagggaggaaagcacaggagcagcttgcatcagactccacccgtaacaccagactctaccgcaaatgtgattctaaatttctcaccccagatacctgtccttgcctctgccagactggacagacccgagtgaaaggaagtccatgaatccccgctgcacttccttatcttaaatctctcaggtccttttaccacctgcatgtaggcaaaatcggtgtcttctcgagccttttctgttcaattctgactggcgttaccactattgacaaatactgctgagtagttttccaaacatttttaatttgcaaatgatatcatttaatagaaccgaggctcaagagtcctccttgctcataaaacattagtttccagcttaatgtcaaggattttggtaaaggtcttggttcagaacgttgcaccctgcttaggttccaacccttcatccctcctttccctacagatgagatcttctgagccctgcttgtagatttaatgcgtcaccgcacccaagactgcctgagcggcatccttggagaccccactgcccactcttgctgccagttcagcttccatctcctgttccagctggggtttagggctgcctcagcaaccctgtcattgatcccaatcctgatcactggacccaagcatcgttcccgcccctgagcctctgccttgccaagctgtactccacagcagcctccctaggaatggctttctgccttgctccagcactgctgcatgcagccagccggcagctgcagcgctggggactgatctgaggtacctctgcaagacaccactgtctgtaaagacagccgcatcctccttgtgcctgtccagtgcctcccatggccgggggccagcatggggctttggggtcatggagttttcccgttgtattccagtcattgtctcagcacgtgctgtgagttctaccggtcagtccagagaccagccttcgcagtgtaagtttagttcctattctgtcccttcctatctctttctaggggctccagtctataagagttacccagagtggtacaggctccgagtgagaacagacacatgtcatacaacggcggagagaagcaaccagagggctggtcccctgggccacggctagccctcagggatgccttttccagcctcctgtctccttcttaaacccaacagactagacagcctcccatggggtcagaaaggaggaaagccacgttgtgctcttagaaaaggtcccagggagccacatttcgtgggctctgcagtggtgtgcctgcacttcagactgtgaagcggctgccttcgaacctatttttataggatgtgaatgatgactttgggtcctattaatctgccgcaaggttttattcagtctcatggtcagaaaaggtcatttacagagctgttggttttttttttcggagggagttttgctcttgtcacccaggctggagtgcaatggcttgatcttggctcactacaacctccgcctcccagattcaggccattctcctgcctcagcctcctgagtagctgggattacaggtgcccgccaccatgtcctggtaatttttgtatttttagtagagacgaagtttcaccatgttagccaggctggtcttgaactcctgacctcaggtgatccacccaccttggcctcccaaagtgctgggattacaggggtgagccactgagcccagccccggttggtgattattaataccagctagatcttcaaagccattcctgaattgagaacgatttcatgggtgtttttgtgaaacgggctagctgtcagccgggattgatcacttgactgtgtcagttgcagacagggctggaagatatggctttaattttctttctttctttctttctttaaccacaaaacaaaacacaaaactgtttcctcaagccccttgtattggggcctattgcaggtgaagggggctgaccaaaggaaggaggtggcgctgatccagaggaggctgagtgaggggtggagcggagcccagccgagggagggaaggagaggaacgccggcccactagccgaccccagcgcaacccagcgcggttcccagacgctgccgggtaactgatgccgccggcacagcttctgttctcacttgtggagctttgtctcccctcgctgggcagcccctggtaccgcaacccgcctggccgccttcccggctgaggcccccgggcagagctcctccgcagggagcattcccgtggacaaacacccctttccctggtagctgtggcaacagttgatctgtggcagcggaccaggaggagggtcaaatgggagaagggacggccagctggtcctaccagagactgtcgctggcgtcctcaggggccgctgcagggccaccttgtgtgcttgccctttccccacggtagactgccccgggagggggactgtgctgcctgaattcttgtccgggtgggactggcctcggtgaaggatccgggaatgggacttccgggccgggccggaggggaagtgtcaggaagagctcaggctttagcgagcctggagggaagggaaggctgaggtctcctctgcctccgcagccacacggcccggcgcggggcgggccggcagtaaacctaagaaggctttattcatttcctggaaacgtttcctggaagcctggcatgtgctaacgatacaacattgaacaatacaaaggtccctgacacggagcttacgttgcgtccaccaggtagacaggacacatacaagatatgaagcatagtacatgtttaatctggatgagaagaggagaaaaataaaacaaggagggagaggcgacctgtcaggggccagggtggggtgagtggaagaaacggtgtccctgacaaggtgcctggtggcctcacccggaggaaagcacggtgcagaggaaacggttcagtctggtgcttgaagccccaggacccccgagagagccggacctggacgagcatgaagtcccgcaggaggaaggcggcccagagccttggaaaatccatctgtgctgagcctgggctgggctgcttcactggggcctccgggggcaggatcagccctggaaagggcacttttaaaccacgtgtgcagatgcccaccaagggaacaaggtcagaaggagccatggctccagaaggggtgccgatgacgtggcccccggggttggagatgcacaccccgccactgcctgtgctccagggcagaggcacctgccccctagccagacttgcttcggagatgggtcgtctccaaggcgctgcctggagacaaatgtgccccagagcccagcaagggctgtaaacaagccgttgttacacgatattgcccgtgtgtaggaagggcatcgcttctttccctcagtacagtggacacacctggctctagcgggcacacgcggccaacctcaaggcagtgctctctggtttgccacagtctcacatttgtctgcccagacacgtaactgggacctcaagggccttctgtcagccttgccctgggatatctcctccgtgtggacagggtgcttcacttggactcactggatgggacttgaacacctgcagagttaaagctgaaacactacctgggtcattttggccagagtgtgcacagacccgcaagcacccgaggctcctgctgctgcgcacgcttcctgccaacgttcccttgcccgaagctccctcctctcccggctccacccatcacactactgaatcccgatacaacacgtgctgctccatcctgcctgtccacacctctttcctgtgactctcctccctcccgggagtgcgcacgtcttcattcgtccatcccctcctgacatgagaaatgccatcctctgtgggcctgagaaccttggtgcccgcaacatctgatctccttagagtgctagaacagagccgcctgcccaggaccctcaggccagcagcaccctgcccgcctctgcctgccaaggagggaccatggcctgggtggttaagggagtgggaccctggcttgcctcatgtccactcctgccaatggccactcccctttcagaggaaaccaactctacaaccagttaacagactaggaatttaaaccacagccacttccccaattgcagaaacattacttcacctctcagagtaatggaccagcaatgctgaagacgcctttaaaaaaatgccagtctcactgcgccctctcctccaacctcccctttcatagaagaggttgccaaagtctagggagagtactaggacttgaaggaggttccttgttagttcaaggaaccaaactctggtcctgacttgggtcctgcaatatttttattatgccaggcgaaatccaattcccagttctgactacggtatccagcaacaactaagtcattctatgtcctggtgcaagtcattggaagaccctgaggctcaaatcatctgtcatatgaggctgccacctcgtgttctgtctcccatgtccctgcgaagttgttgtttgttgtttgtttttgttttgttttgttttttgagatggagactcactctgttgcccaggctggagtgcagtgatgtgatctcggcttactgtgacatccgcctcctgggttcaaaccattctcctgcctcagcctctcaagtaactgggattacaggcatgcgccaccatacccaccagatttttttgtatttttagtggagatagggtttcacaatgttggccatgctggtctcgaactcctgacctcagatgattcacccgcctcagcctcccaaggtgttgggattacagatgtgagccaccacaccaggccggtgaagttgtgttgagataatacctgtgaaagttatctagaggtaaaaccactataaaaataaaatagaaaagtaacaataagccatgaaaactggtgcgaaggaatccctgagttctgactctttccctgttgctcccttatggcataacgtgcttaagtttgcagagcacttccatactcagccacacattctcacaacaatcttttgaagatgtgtgattagtgccattttccagatgaagaaactgaggctctaggagatgaagtcactgtcatttgctcggagatctgcagtgagtaaagggtgtggcttggatttgaatagggtcttccaaatccagactccaggctcctcccactgccaatcactcttcaatatgaaagcagccactggcactactcagcgtgctagaacagagaatattcgctctgtgggactcctctgggggttgaaatgaggaacttctgaatcagggagctcatgctcaaccctggctgaatccttgagaggactcagggcaagcagaacatcaactcctccttcaaggggaacaaaccataggctgaagggaactttagagctgcactagcctggctttcttattttaccaaggcataagcacatccaatgggagaagatgtcttcactcagtggcataaaacacttcctgatgcccaaagtccacctgggcaaagtggccaggtggatgaagttagtgtcttgaagcttcttgttgcctctttcactggcccttcctatgccatcgcctctccccccaggatcagggatgtcatccctcaaccctgacatggctcatgcccaggtctgcctactcccacagtaaaatgctgtccaacctccctttcaaaattacctccgctggggaaaatgcttatcatatatttgtgcaaagttttagcaaggcagccccatggtatctagggaggtctgaaggatggttatctttgggggcgcagttatggatcattgctattttcttctctatacttgaagtattttcatgttttattttaaattttaacaataataatgcatttatttatatgcttctttttaggcctcttctcagcacactgttccaaccaaaattgatctaataaacgtatttattttaaagcagcaaagattgatactgacagatggtatttttattccaggctcagtatcacagcctagcttatttccttaagccaaaactctgcccttctgaagtagaatcccaggcattctggtttattgggaatagagcttagaattggggcacagtgggtgtggccatggggagatgaagaagcccttaaactctgctttttttccttaatagatcagaagaacatcctcattcactagaatttcatttacatatgggagatttctgccagcagaggtctatgcccaaatggtaaaggggaaggcctgctctcagcctgtcttgtgagcagtgcggacgctgcccttcttccagtacattcttcatcaaaattcatgtgctctgttctctcatcgctcccctgtttaggttctggtatgcacaaaacacatgctcgagaattagctggcacaaacagttgatatgttgcttcatgtaatgtgaatttacatgttcacaggagggcctgtcagggtaactgggttcaaaggagttatactaatgaggaaaactctaggtccttgacacataaatgctggagatatttttcagcagacggatattttggcattccctgaatatgtgtatgcataagttagcacatctgcttgacatcttatttggttgggttagccccagttcttcacagattcattttttccatactagtgtcagacaaaatggttaagggtcaaggtgccctaggagaaacctacacataccaaagaggtaggtggcgtcggtcgaaaatcctaaagcaagtgactagcttaaacttagttcacagtgagagatgcaaagaggcaaacagaatcaggagagagttacttacattatcagagaacatcataatttggagctagatggatcagatctaacatcttaaattgtagaagaaactcaacctcagatttactgagacattagtgaagaagcaacggtgtagtaaaaagaacgcttgaattttacttgctatgtggaataagtggattaaccttgagtaagttatttaaacttgcagagcctcagtcttcccatctccaaaatggggataataatatagacctaaactgaactatttataagtgaaaatgaaaccatgaaaccatgcaagaaaattcttaacattatgcctgatacatggtaggcacttatttatatttatttatttaagtgacagaatgcaaactagaaacaaaattactcatgttttagtgctgttttcgaaggttcatctcagaattgcttggaagaacttttccaatccaagtgccaagctctcctattcacagaagagttgcagttacacacaagaccatagctggggtgcaggggcgagtggcaatttgtgtgtgttcgaacctgaatgaagacacccctgaatgatgtgtaagacactatcaaacgtgtgtgtgcgactacacaaatgtgaatgcaaatggggcttgaagctacatgtgtgccctaaaacatgtataggagtgtgtgagagcatgtgtgtgtgcacaagtttccaaagtggacaaatggcattgtctcaacagcactcccgtttcctgggcgtgtttctgcaagcctgggtggtatcacaaacacaaaggcagaggtgacaaagaccattaactcttagaaacgccatataataattatcatgatagaattgctttttcattgccgagcctaatttgaggccagctcagaggaggagggggacacatgaacgattctggcaccatccaagctgatgctgtggctctaggtgggagaagaaaaaactctaggatctcctgatgagcaaaagccaatccccagctccctgctaaattccacttctaacaagtagtgggggctgtctagttggtgtccttagtacatattaacaataaataaagcttcaataaatatgcaaagcaaaaactaatttaaattagcatttgtgtcgggtggggcaagagagtccgttccaccataaagtgatttaggatatattacctcgggcatctgcattacaaatttacctctcattacagctatgttaacgggaaaaggcagcttctcaacaacatgcaaggcagagtttattagcataaatttgcataataattagctctgcagcaagcaaaggctgtcgtgtctttcaaacaggcaacttccaatgtcaattttctgtgcttcactgcttgtccctgttctgtctaaagctcccggaacccccttggcccttctgctagttggtaaattctcccaccctggtccatttaggctcaagatttcataatctctacccagcatcgcctgggagaaagtgaatgctgacttccacccagggatgtgatggccagaggcgggcccacaattctattgcctatggacgaaggggactggctacaagccctcactccctactttcagagcctatgaagagaggtaacgcaacggtgtggctaattccaaagaaggtgcaactgaaactatttagatgatttttggaatgcataaatccaagttgtttattagcagttttcttcataattatgttgtgtctaagctaatattataattagttcccattgcctgggttcatactggctgggtggtctgggcaggcagctgaaatgaatgaaaattgtaccagggataaagacaaaggagcaggggctgggggtcaagcgatgttggttcctcggactctgtcaggaccacacctgggcaggagagttcataccctgagctcaaatatgtttctgcaaacttagtggcagccttcagtcttctgagacacaggacacatccttctccagcaagccaggcaaggcctttcccagccactgagatgactctggatgttcacctacagagggagcttgggagagagaatgtgatctccctgcagggtacgttcttagaggctccaatgagaggatgttcttaaatataaccagatatgtctcatctattaaaataaaatatactaggttggggtgaggcaggtactggctaagacaggcagctcatcaaagatgatggctttgccctatccaagctcagtgagatagatgtggacaggcgaagcctctgctgtgcttcaaggaaaccagcatagaaatgacatccgtgtctgtgtgtgtatgtgtgtgtgtgtttcttactagctcagcaaaagggttttgcaacatttgggtgtgtggtgggggtgattgtgtaaaacatatagatgagaccctttctcacaagtggaatgatgtaaaaagtacaatatattgagtggttttttatgtttgagacatagttgtatatttagatgtataaatgagtcttgaagatttttctgattccaaagtgcaaattttgtcaaaggaatagcaggggcttaaggaaaaatcactggcccaggagtcagacacatggctctgtgctagcactgcctgtcgaatgatgtgggcaagtcactcccagaaacccaattttcccaaatgtaaatgtagatcatactgagaggttagaagtggaacaagtactttcttgtctggcctattgttcatttttaaaagtgatggagagagttttaggcccttttatagtttagctaaatatttggtgtcttctccaaaaacaaacaaacaaacaaaactgcagctacaaacattcattccaaattttgagtactgagcactcatgggcctcctgtgttttattcctaaaatcctgcaaatccaagagcaaatcttcctgatatcgcccaatcctcctattgtataaatgtgaactgggctcagaaaggataaaatgcttgcccagagtcacggagttagcggtagtgaagtcaggactgcgtgtgcaggacggccccgtaccaccaattgctcctaagtgattcccaaaggatcatcgtgcacttgtttaccgtactcagactcgggccacatgaagttatgcgatgggaagttaaaaaccacctgctggagggtgggatggggagagaccgctaatgagtactggtttctttaatggccatgaaaatattctagaattaaataggggcgatgggtgcataaccttgggaatatactaaaaactactaaattgcatgtttcaaaatgatgaattttatggcatgtgaattatatctcaatttaaaaataaacctactgtgacaatcactcaaaatgctattaaagaactttgcatttgagaaaataagtgagactaaacatttaaaataactcaaaaggcaacgacagcataattcccctgtaagttgtaggaggagtaaaagcagttagaaagagaaaatagaaaatctagatatggttaactaaaacaaatgaatgaatctctgactcatacatgtgggataacacccaaagggaaatacatcttcagacctgccttactcgcctctagggacggcttgatgaccagatgtggactaagtctatcaagtatgaaacgtcttttggcacttttccataatcaccagttagagaaggagagtgcgctacgtattggagaggagttcggttgactatgagtgcagtgctggtctagggaggggacagacagtgagtgctgagtaaccagggacaggtgtcctggtgggcttggatttgtgcaccactgcacatctctccatcaaacacaaggggactgtaagtactcaagagtgagcgacagagatttagtagaggcattgactaagtcttgtgacactggttttactgggacagcacatctcagccaggagaacattgcctgagacaagggttggtgtgaagacagattattttggaagcaactctgggtgactggtgtgagagaaagggacggtgaaacctggaaggaggaagccagcacagagagagctcttgagtgagtcaccatagcgaagctgaggttcaagtgaggctcagtcctgaacagccttctgaggaaccaggtacgatacacctcagaattacctgcctgagggacggagggggaagaacacaccctccatttctgcttcccccattagtcatgggttcttaacgatctcagactctggttaacacctgagcgctcccaagtttccttcaggcaccagtcaagccctggggcagaaaagcaaggtgcagcccaggtgaggggctctcggtttgcacctgcgaggagctcaccatggcagcattggctggaatgaaaggaggacagaactggtgtgagtaagggcacagcaggtgctgggaatggtggatttccatggaccagcgggactgaagaggagcagtgccaaagggctctcctagcaggactccaaccacggaaacccaggacagggagctgagggcagttctcagcaccattctaatgagctgccccaaagctgaagtcagaacttgtcctgccattggcaatgccagccatagaaactagactgcaggctccttgggggtaagagttacatcagctccatttacccctgagttctccacgtgcagacctgtgcctgccacatgacaggctctcagtaaataggtagcaaatgcgaagtcaccgtgttgccaggaatatgaaatatctgctggtcttgacatcctaaccttcaacaatgcttttgccaagtgattatgaacaaatgcaatgaatagttactatttattgacccagatacacggctatgtactttatatatgttagctcactgaaaactcacaagaccccttaaaagaagagcaataaattatcatacttgtttgtgaataaagaaaaaggcttagaatactggcccaaggtcacagaagtggtaaatagcacaccctgggatggaaaccagtttgacttattccagaacgtatattcttcaatattaatccatcttccattccacgccatccattctctacatgaatgcctccagtaatgggaatctcattcattatttgccgagatagctcgttcaatctttacagagcccttggggccatacagaataagtcaatccacatttctttctttcaatatgtaaatctacttgaaacatctatatctttctagagctcatttcaaatgataatcttttatttttctaaaaccaccatgtaaaagggctacttttcttccctgacatctggattcagatattatatctgaggtttgtgtatcatatatgagctggaccagaagacttctaaagtccttcccaagtaagaaattttgttcctcttgctctagtaaagcagtggtccctctccttactttggctgccaggagcctaagagttttagtacctctatgtaagcatactctggtattagttgattacaatttgttgctgtgtgttccagctccctttagagggagaagaaagtataaactcttagcccatggtgggagcctatgcagactttccaggccagacttcagaggtccttgaggttggcttccaggaggatggtagccatggcctggggagagtaaaggatgcccaccagctagtcggggctcttgcccccaggatcctatgtgaagctttggttcacaggtcgtgagcagcaggatattctgcttgttaatataattttttatctactcttgcaaaaatatgatgagaacattaaatccagccctctccataatcatgcgtcattatctaatccctttgttacacagacggctaagctttaaaatgctgctataggtggaaacagagctatcagaagccacatctctcagccccatttcaaaagttgcccgtaatgagaagcaaagttaaataaccatgcacagaatgacgcccacccctgtctgtccaccatcatactttctcgcaggcatcctcagctcaccaggaagtggcacctagggcaagtactgggggacaggagggcagagagcagaaagaaggaaagtgtgcgtgcagtggacgtcagcctctcacgcgtccccaccctgccctgtcagcgtagctgcattttgtcacagactgagtagtagacaaggctcacctcctccccataccccctttcttaaagtagctgcaagagtgcaaaatattgacactgacagatatcagaggtggctgtaggatcaatatttctatggcattgtcaggaatggtttggcaacctgctatgtgctcaccagcctttcattcattatgaggccaaacgggagccatgtttctccaaagacaaaaccaggacagagcgtgctgggtctcagaggcttctcctcaatgaggcctttccctgggacaaggtgctgcagcaggagaatctctgcattcttctgacagctttctagagaaaggaggccacttcccaagggctctgggggatgagcggtggggacgctgccgggaagcagttcgacactgactgatgctttgctgcaggggctctgctctgaagccggacactgccaggtgcacacagggacagttatactggcagtgatgcctctcacgcctggccccccaagaaaagtcttggccaggaaaaagcacgatccatctactctggggagagatctgacaatttaatcaggaggaagaaattcttccgagccagcccaggacacctgattctcccacttcccccatctctgaggcactctttaacttggggagctgcacacagagagcaggagacccaggcctaggggaccttggtcctgccaaagcctgggctcttggattcctaagtcggtgtggaaacaagaaggaatctgcagcaatcaaacctccacccaaattccagtcagcctgtatttttttcctttttattcagttatttgaatgataaacctaatacctgttatttgggatgacttaaaggatataaaatatctaatgtaaaatccatagtctctccctctcccatgtacattggtattactaatttttagaattttagaaagacgctgtatgttcttccataatttactcttggtttgttattttttatataaacatatataaaaatctgtacacttttttgtttttttcatacaatagggtggtgggatatgtattattttgtacttcatttacttaatattttgtagacacgctttcaaggcaatgcatgcatacctttggaaaacaaattggctacttctgtctaattctatattaacttttctaaatagtttgtcccccttccctattccaaacatttttctagctgaattcctcaggttttgagaggcaggtgatgtctgggatgaattgttggcattcctccactgtaagcctccattctgcactggttcactcagaccacccacttccacctgcaaagaaaaatgtccctgcatatggggttccatttaagatgtgaggaaagtaaggcttcaagaggagatgttatacaagactgtagaattctaggccagaattggctgtgaacgtcatgcaaacgcaagcggcggtccagacttgattctcccctttggctggcttcctccactgtaacacagaaagactcctcagagcactgtcacaagtctcaaatgagacaccccaccccccgcatagaatcatgtgtgaatgcaagccatcatcagcctcatcattgtcatcatcatcatcatcatcatgaagatgcggaagctcagagaagctaagtgactctccagctggtcagcaggctggtgatggagcagcgtgaaacatgcacctcctgaccccactaggaatcttctgtattccaaaagactcatctcaactggttcttctctgccaagcaggtgaaggcccagacaaaaagattgcagttgattgatttctagtagagctagtgtgggtgaccactttgtgatcggttagtgatggttggcggtggggcaggaggtagcacccagtcttattttgctgccccccatctagactacctactgcaggtggccgaggccttgtccttgagggaattctgcaacagagagtatcactctttctgggttgcggttctctagagtgatgctagggaaatcagatgaggtggacttctgagctttgcttatggctctgtgagctcatttagaactcaaccctgcctggatatcaggagggctgggtttggccaagggaatctggagaggtctgtgccccatcaagctgaggaacaagtactgagattgccccgtgacttggagctcatcacacggagtcaggttcaagctttccagccctgccctcattttccccgtgggctcggcgtgatacctttctgagtaggaagtggaaagcaatctgaaatcaagagtaaaataaagcaagatccctacctaatgacgcttgtaaaactggattctatacaattttaagactgtaatgtgaaaagtgaaattataaaatcaataaagggaaatgtcagagcttgtctttgtgaactagaactcggtaagaatttttttaattactataaataacttcaaaagcaaaaagcacaaggaaaaatgatgactgaggatgacagaattaagaatttctattaaatgaaggaagcacaagaaatatgttaacagtcaactcattgggagaagacatttgcaatgcataaaaacaccaagggatgaatactttgtttctacaaagaaaatcttcaaatcaataagaaaaagaaaagactcctattggaatataggcaaaagatgcaaacagacaatttaaacatacaatgcaaatgcccatctaccggccacagaaaaaaaatactcagataaatacagactgaaagaatcagaatgtggaatacaagcacttcacacataatttgctgggaaaaactggaaagctggataatggcaagagttggaggggatacagaaaatatgagaaaccttatggaagccgcgattctagggaggaatctggtaactcttagactgagtaaattacattgctatgacctagcaatttcacttctgagtccatctcagcccccaggtattatcggcgtactgaagtgggaatctgcaaagatgtctgctgcagtgttgtgtagagaaggggaccggacagacatacttgaggtgcacaccaagcaggggtgtggacgcaccgagcacgccacggtggctgtgcgcaatgaactcaagatgcgtgcagccgcccggacgatctgataaacatggggctgagtgaaaacacgggaacaaggagacacccaacacagtatcacctacattgctccattaaaacagctgaacatctacacgctttccacactggacacacaaacacggcaacacgacagacacactgcatgtgtgcagggactacagcagagactgaggataaaagaaaatgagcaatggagtgagcaggtccttgtgtaaaccggtgacaaagaaaggaatatgtttcagtcattagcctgtgccggagtgaaaaggaaataataatataaaaggcaacacgcttttgaagtttagagacctggcttctacccctgctcaatgactcctgctgtctaggcccttgaccctcatccctccagtgaggagggcgcagacaaccctggaaatcacctctggtctaaggttctgggatgcaccacgggcagctccctgagcgccacaatgctcgcttttacagagcggcactggctccgatcaggcacaagagggcgctccgtgcccgtgtattttaagaatcttggctgtcactccaaacttaagacgtaaacccagaaatctctccaccgcccccaactaccaccttcatacactccttatgctatgctattcttttactgcttgagaaatacaaagcacccacctactaggggttataaacgacagattttagagacttccgaggccacgtgaatcttttttactggaatccttacattccccagatgtgccacgttagttctccctcttgttgatccaagctcatccccaccccaatattccttcctcccacccagttcctgccgtgtctcacccagttttccacatacacgcccgcctgaattgatctccgggcccctggctctctctggatgaagacatttgccgttggcaagcatgtttgatatgaaattgcttgtacttttgatacgcattttaagctagtgtaagtaacgagaggcgtatttcaactgaacagaaggcaagaatggatccatggagcacacagcctcacagcagggttatcccatctgaataatctcccctttccggaggtgctcaaggccaggcattgaccatgcaggaatgtcacagggggacccacatttttgatgggcagctggagtagatggtgcttcagatgatttataagcattcatttgattttcatatatgtggattcaacttatgatctcagatctgatttcctttcagataaatcaaaaatctctatatgaaaagaggctaaaaaatggctaaaacaaatctgcccgagtactctacacttgttctggggtgacaaaaaaatgactgtgacaccctgcaaagtgcacagccaggcgtggccacccactgtaagaacctcgggaggttcccatttcatctcttgcaccagctcaccgtgtgacctcacaaattcacaatttcacaatttgtgaattgtgaattcacaaattcaccaccccctccacttccgcctgcctgttgtaaggtgagaggaaggacctatatgttccccaaggtcctgtccacctcccgcatcccccaaccttctccatcctgctgcaggctctgccttttgctccataatgatgccagagacatgctgaggtgcccgtccaaggggatggaagataggcatcactctcccttttcacaaagcagctcattgggaatgccttttgaacttcaaccatgttagaaaaacagttttacagaattaattcaacataaggaggagcattttagcagaagtgtgtagagagttgggaacagagcaatgaccagagaagaaaactccttatggtctatgaatagggtccccactcaccctacccatccacaacagagccagaactactggccaatccacaagagctacagcaacccagccagatgcagatggccggatgtatagacctgacctggaatcaacctgcgggactgtaggatggtaactctcagactccagtgtgtcccctcatcacccatgcggtcttgtgagaatgtgggttcagctttggtaggtctgggatgatgcctggaacttttgattttcaacaagctctcatgacactactgcggccggtgtgtggcccacacggtgagtaggaaggccctaagagggaagatgaagtagaatgccaacgattccatacttgcagcggcaccgtgagaaaacattcccactttggtaatcaaatgttttttttttttttttttttcctaaaataggctttagtctcatctgtggaatgttttaggtataatgctgcctgagacaagacggttagttgagaggacacccccaggtctggggtgccatattcacacatttcattaaacaagttcctccctgccctcaaatcagcaaaacacccaaacccactgtgcccgtttattttcactcattctattgaggagccatttagcaccttgaagctggagagagaatcagtataaaagctcttgtcgctatgaaggagctcaatggtttttattgcttccatcctttaaacaccttgcaggcatctgtttgttcacctcttcattcattcatgatttactcacctaggccttctgcatgctgaagcctgttctggaggctgagatatcggtgcagaacacgactgttcatgggtctcggagtctagtggggacacaggtgagtggaagagtgggggtgaagcgtgcatggtggggaaaggggcttaccgccaggccttattagcttttggtgagaggaccagtttcaacattatatccacaaacataaattggaagtgttagaattggaaggacccgaagccgagataatcaatgtagctattccttgtaggacactcctgcagcatcccagtgtgctcctgacttcagggtgacaggcgcatctgatgtccctggtggagaggggaggtatacccatcccttatatttacaggacttggtgcttccatctggagggttagggctctttgaacagttaattctccgtttcctttgggatgtcagccccgttggtaccacctagcagacatctctgaggatgcggcatcctgctgatcatttaagtgaacgcctcctccactagatcacagattccgcaacttaggaactgaggctgatgattctctgctttcccaattcgtaacccagtgtgtgctacaaagcacaagctcaacgaatatgtaaggaattcgcaagtggctgagcgaatgaatgaagcgctcttacacaggactgtatttggtgttcacagctcgtcttttgttttccacatcctgagctggagtagattgacttctcttcttgagatgacagacggaggcttctatcacattctccctttggataagcccaatagtgtattaaatgcactcctgctctagggggatcctgctactggacctaagcacctcctcttaaccccagggggaggctttgtggggtacatcaatggtactcatcacccaatccagaatctccttctagaaggagaaactgaggccacagtaaacatccagcccccgccgttcgaatggcaggtgaagcgctggcagcgcccctccccgcccctctccgcatacagcccccacccttctcagcagccttcagccgccagcgtgtgctgtgaggccctttctcttccaggcatctgtcccttgcatcccaacgggagcgcggtcccctgggaggcgtccctcagcagccccgggaagttctgtccctgctcccgagtgtgcccagagtcctgccgtttccttctagcgcgcgttctttactggcgccattcctgctgctaagagccctgagacggccgggggtgacccgggcccagagcagctcccggctcagggacccctccccaggccaagggcaggacaagcccgggcctgggcctccgcctcggctcccctccagcctctagaggagccccgcgtccgcacgacccggggtcctgggccactccgggagcccctggaagccaccagctcccgcgctggagtcttggggccttgggtaggcgagccgggctccacccggctggggcaaagggaaggccgggtctgcccaaggcagaggacccgctgcgccgtcccctccccaccctcccctcttcccctcccccgcacccctcctctcctccctatcctcccccctccccatcctttctcttcccctcctccccatcctccccatcctcccctccccacgctcccctcttcccttccccacctgccaccctcccctcctcccctcctcatcctctcctccccctcgcccatcccccttcccctcctctcctcctcatcctctcctccccctcgcccatccccctttcccctcttactacccccgccccaccccgttctgcgccgagtggcacagccctcggcacggcacggccctgtcagctacgaagccgggcgaggggctcaaggcccctctggagaccgcttctcccccgcggcccgtcccgccgctgcggaccccatgcgcggcctccccgccccggcgcctgggcctcctcgcggcccgggcggggcccaccaacccggagaggtcgccagcctgcagggtgccgggggcccctccgagccgacctcgtcccaggcagacgcgctgcccggagaccgccgcaagggggcgccaggggccggggcggacgtcgcgccagtgcctcgccgggaccgcacctcgtccgcgcggccgccagagggcgcccgtcagcgccggagcccgcggcggacgccccagccgagcccagccactgcctggtggagccacagggcacccgcccggaaacaccgcctgcgccccgacggcacccgtgtgcgcaccacactcacatcacacacaccacgcacacacacgcacacacacacacgcacacaccccgccgagcgggccgcacagtcactggggcgccgctcgctttgctgcctttcccgcgggtgcactgagcggcgggagcgggagccgcgggctttgcctgagccgggcgcgcgctgtggtctcactcccagacccgacccctctgagctgcccctctccgaggccccgcgaccgcatgcgtgtgtgctcccactgccccagcctgagtcccggatactggtgcccctgtctcgggtcgctggctgcggagagggctggcctgagggagccaaccccaccccaccccagcctgggaagggccagagaggggccaggcagggccccggaaggctcggcccatgcatccagcgtgcctgctcccaggaattgcacctggattgttccagccattgagtggataaatccacatctcaaagctggattcagttgcatgttcgccacttgcaatggaaagagacctggcactccattcatactggaacagttatcttgggtttggagtattctgcaggatattcctttggaacacggcctcgccactggggagagaccacatctccaataacgggaggcccatgtggaatgccagatgccctccagaccagcccaggatcccacatgggctgtgagcgcgaggacaggaaggattcgctgcacggaaggttgcggaatgacgggatgatgaacttggtagatgtcccaatcctaaatgttctctctttgaattcttactgtgtgaaaaattcatttggcaattaatcatatacagccttgtgacatcttttctgttattgtctggaattgttatttcaatcctttgttactaattgactttttgcatgctcccgcctcgtctccctaactagatggcaaattctttgagagcagagacctctcttgacattttttttttaactggcaagcggagactgtattgtgcattgtacctacccacagaaaagatctgtagggcaggccttattggtttcattttataaattaggaaagtaactaatggtaatagctcctccaggaacaaacaactagtaagtggcagaaccagcattcataccttggcagttctccaaagcccaccccccagacacctgcacagggccttgcacaccctgcgcactccataaacatcatttggttcttatcattctcaaccatcaatgttttaagaaggctaattaacatccgatgaaggtcaattttcaaattcaagtttcgttgtttagtttcccagaaagaggtgttaagcttcagctgagagattcagcttccacaaagaaaacttcataccagggaggcaaatattgacgcaggcatctcttgagggtgtctaagtttgaaaacaaagcacttcctcctttaaaatgaaattgaaggatattcggcttggcttggaagccaatctggggtcaggcagcacatcactgggaggcgtattggggcgctccaggcagtcggacagatagggcctggcctgatcagagaggtctggccccaagcccagctctcttgctcagcctcatggggtctccatgtccttctgcactgcgagtatgagatcacctgttatatctgtggtttttataatgtaactcccatcatttctatttaaaaccttgccatttttttttacttagaactcaaactcaaattcaagcatgagtgagcatctaccatacaatatagatttattataagaaccatgatataaaaatactgacatcaaaagcctccaccatattgttcatctgttcaaagtccgactctgctttcattacctaccaaataaagattaaaccatgtattatgtcactcaaggactgaaatatctcattcctacttacttttctaagtttatctccttcactttccgtttatgtaaaatccagctaaatggactcctttatttaatgttgaagttcatccttccatttagatcccacttccttcatgcctttgcctggaaaaatatatttatgtcttcactgattcatacaacccagtgcatttcatgagtagctgcctactatgtgccagacatggggctccacagtagaactacagatctgcctgggattgacagagttcacaccctgtgttcaaacgcttctctttcatgaagtttcccctcattaccttccatacacaatacctcctttctgtctctgccacagccatgttacacacagctctgtgttttaattagctgtgtgcatgccattccccacaccagacactaagctctttgagatcaatggtggtgttttctttatctttaaagaggatccctttggtacccagcacatagagcaaaaactatttgttgaattgatttgaaagagctttcaatgcatttggcaagacaaaccttacctagcaattaactaagaaggcagtggtgtagcctgatgaatgtaatttatattctcatacaataaagtaccaaggcatatgttattgatgagaaaggagtgctatgtaacagaatgttacatgaattaaagatcttacagaccaaaagaaggtaaaagtacatgtgcacctcaaagacaagtcggaattttgacgaaggtctaaataggcattctaggttggaaagaactagaagagaagagagacttcttgggttctagtgtatatctgatctgagaatgaattataaaagtagaaggcaatctaggagatcatgcgtatgttaaatctgcagtagccaagtcatctctggaagctagttgaattgtttaattaacctgtcggttcatctaatatctaactcggctccttcctgctgcagttgaaatccttctttgctttattccatcctcagagaaaatagaggacagttaatgatccctctctgtgcatttcagaagatggtgtaaaacagtgctagagaaagccttttaatcatatatttcaaatatgcagatccaaaggtgataattcaagcacagctttaagatttttcaaataccttattccatctgccttgctctgatggtttctatgaacacattttcattttctaaatctggaattagtagaatctgcttgaaaagggatattacagtcaagtgatgttctcaatttgaggtgtaattattttcccccattttaaaagcctaacataaaatgtgatgtgatttttttttcaactttgcaagggacatcaacttttttatgtcttcaatttttttctctgagcttcctacaacttggagaataatataaataagaaaggaaatgcagataagttcaatttctagtttgcaataaaaagtcaatgtattgtctgataaatgtcctcctctttaccccatcttcttcctgtagatgaaaattctgcttaaataaatgaaatagttggcagataaagattgaatatattcaaggtgtacaacgtgatgatttgatgtaatgcatggtgtaatgcatggtgtaatgactgcacaatcaaattaaggaacacattcatcaccacccgtgctgtaccttaggtccccagaagctgctcatattggaactgaaagtttgtaccctttgaccagtatctccccatccccctacactcgcagccactggtaaccactgttctactctgcttttatgaatttgactttttaagattctacatataagtaagatcgtgcggtacttgtgtttctgtgtctggcttattttgcttagcatattctccaggttcattcatgttgtctcaagtggcaagatttccttccttgttatgagcttattctcaaatcaaaattcttctggatgctacattaacccttagaacctaagtatacacttgagcctgcctgagatgagattgcacttagagtcaaacatcaaacatcttagcactgagaggagcatttgagatcatcgagttcaaacctataatttaacagacgacgaacttaagacccaaagaggttaagtgactgaatgaaggtcacgctgctggttagtgagagctgaggctaggactgaattgctgcttaggctctttcaacattatcgttatatttaccaacattttccaagttgatttttttaaatagcagttttgaagaagatgttaataagcattttctttcattgtataattttaagtattattttaggtgtaggggctacctgcctaggtttgttagatgggtatactgtgcgatgctgaggtttggagcacaaatgacccagtcaccaggtagtgagcctagaacctaatagggggttcttcagcctttgcccttccctccatcccccttctagaagtccccagggtctactgttcccatctttatgtccatgtagactcaatgaataagcattttgaatgaaaagaaaaatatgtgctggaccaagtaaacttataaaacatcaatttaacctgctctgcttcacagagtttaacatattaattttctgtcgcaacccgagagagatatttagccaacacgtatgactacagactatttttaagttaacatttaggagcatctattaatatatctaacatgccagcgtgccagagaacagtatttggaagatgctgctcttgactagaaccctgtagaggtatgatcgagcttgacagcaaatgctgatgcttacaggctctttcccgcactggctagctgagcagtcataggatcacactacccaaacttcaaagccctcatctgtaaaacgggcactcagctctcttactagacggttaggagatggtatagcagagtaaaatgtgtgaactgtaattatcaaattgtatttgtgacagcttgccaaagtatccactgtgtagcacgataaaataaatatatgagaaaaagtgtgtaataagaaggtaagggtgagaaataaaatacaactgcatagaagtacatatcaaaatccatgtgaaaagtcttatattaatgttgacagtggatggcacatttgactttgcattattaacaaaagagaaagagtactattacttactgtaggcaggtagtacacaaaataaccatgaaccttttacatgggagaaccacggctttgctaagtactgagacagaaaacttcatggttttccattgactcttaaaagcacggattgcgaagtcacgtagtttcacctttgcctctaacttagttaatttagcaaattacatcatttccataagccaccattaactctttcatacaaggggcaagatccaagtgaccatgagtgctgtgcccatgatgtgggatagtgaatgccattcccttcaaaacagcaagctcacactcagtgacagtcccagtggacactgccctcgccaatatcttccaatatcaaagagaaattttgtcatctgtttcttttgccattggcttccaatgaattgggttacaataccaaaggggattgcaataaaaatcacttgatatcaagctaaaacatgcggtggtttcagtttaattcaaatagtggattaattatataacatggataaataactttctgcaacaagactttaaatgagagtggaacaatagaattatacaagatatgcttctgacaaacccctggaacgcaggtcattcatgttaccaacccagaatggtctaaatgttttggttaccatctgagaggggggcaggtttggcagtgcttctaaaacggggagaataagtaatcatgtccccatattctaacacattaagcatgactactataatttcatcccagaaaaattccaaagcaagtgatatcaatcatctatcagagcaatgaaaatatctccaaaagttcccataggatggctaatagtaagtaatgtagtttctagatgaacccgctgatatacactgattgccaaatgtatcacaatgtgatggagtgatttgacccataatatagaatcgttggatctaagccaattaaattttgaagggcaagtgccaaaaaggagcagctgatcttgagccagtctttctgataatagtaagtgagcagaaccaattgcctgttcagatcatagctactatgtgacaagtagagatatacagatagtatctggaaatatgacaaaaaaacaggcatacattatgccaaaagaagattctaaggagaatgtgagtaatgaatacactttaacaacagcactatcatcttccagattattttctttgaagagaattttacttacctagataaatgttatttttgtaagtaaaattacaagtatttattctgtgtttcttattaattgtaaaccactttagggctaagcattaattgtattaactaatgaattaacttactcgtttggagatatttgctgagcatctaccaggcaatagcaacatactctgtgctaaaggcaaaacaaaaggcttctgacaaggtccccactctctaagggcacataatttagttgttctgggagtcacacagctgaattcattaagaaataagaaagaatatgattaagtccctgataaatggtacaggcagtaactacgtactgaagtacagaaaaatgggatacatttggaactgaaactatcagagaaggatttgttgagaaggggggacttcaaccaacccctaaaaaaaaaaacccagtggcttatgtttgatagagacattggggaaggaaattgaagcagaggaattacactcaaaatctgctgtcaatgatttaataaacagatgcttattgagcacatgccacgtactttggcactgttctaggtgttgggaataaaatggtgagcaaaagttaacaggttctctcctaatggagcttacttcatagtgggagatacactaaatatcaaaaatgtacacaggtaaattcacaaggactgtctccttgatgaaactttagtctcctctgaatcctcttctctactaggccttgtcgttggctcggttttagccaagaatcctgctgagcccatttatggagcatcctctccgcccttactacttagacatgcttctcctcctagatacctaatcacattcttagtaattctccatccactcccttacctcgcctgccaactcaaaatctctgcttgtctctgttatatttggggtgctgctgcaacacatacctaaaatggggacatggctttggaactgggtaatgggcagaggctggaagagtttgagatgcatgctaggaaaaaaccctagatgggtatgaacagagcattgagactgattatgatgagggcacagaagaaaagagctttacagacagcctaaatcttcttagacattatcaaagtggtcatgaacagaatattggtagaaatatagatggcaaaggccattctgatgaggtcttaggtggagacgagaaataatgtattagaaacaggaagaaaggccatcattgttaccaagtggcaaagcacctggctgagttgtgttcatatcctagtgctctgtggaaagcagagtttaagagtgatgaactaggaaatttggcaaaagaaacctccaagcaaatgttcagggtgctgcacagcttctcctgacagcttatatgaaaatatgagaagaaagaaatgaagtgaagacagaatttataattaaagagaaagcagaacttaaagattgggaaaattttcagcctggctagattgtgaagaacagaaaagtgtgtttgagagagaatacccagagtatggccaacctaccatttgataaggatcagtatggttagaaagaagctagatgctattcatcaagtcaatgaaacaatgacccagagggcatttcagagattatcagtgatgccatttcctagagtgctaaggccttgagggtagaatagtttcaaaggagaagcccagggcacctgtgggacctcaaacctgaagacccagggatgactaacatctctgtttctcacattctgctgcaatgttccttggcttccccagctgtggctcaagtggacccaggtgcagcttgggccaccacttgatagggcacaagtggtcagctttggtggtgtccacattgtgctaattctgcaggtgtgtagagttcacgagctgtgagggcatggatgcttttacctagatttcaaaagatgcctcagagagcctcagggcccaggcagaaaacttccacagagccagggccatcacagagcatcctcactagagccacgtgtagtggagctgtgggaatgagtctcccccataccacagaactgtacagccaccagagtgcaacgccagcctgggaaagtcacagtcacgcacctcttcaataatgcaaactgaagtgtgggctatccccagcaaagccgtggaggtgaggcttcctgaggccatgggggcccaacccctgaaccagtgtgtccaggaggtgagacatagggtcaaagaagattactcacaaacttgaagatttaatgtcgtttgccctagagttttggattctcttgggacctactaccctttatttccccctatttcttccttttagaatggggatgactatcttatgaccctcccaccatggtatttcaaaagcatataatttgtttcatttcacaggctgacagctggagggaaatttctcacaggatgacttgtaccttgagtctcacctatatctgatttaaacgatatttagatgagactttagattttagaattttgagttgatgctgaaatgcattaagacttttggggctattgagatggaatgaatatatttttcatgtgaggacatgaatttggaggcgtaggggtggaattttatagtctgaatatcttccaaaattcgtgtgcagaaacttaatttccaatgtgatagctgtaagaggtggggcatttgaaaggtgattaggtcatgagggtgcagccctcatgaatgagattagcaacctcatgaaaaagcttgagggggtgaatttacttcttacatttctttaaccatgtgaagacacagcatccatccctctggaggaggcaacggggcactacattggaagcagagaacagccttccccagacaccaacctctcggcaccttgttactggactttgcagcctccagaattgtgagaaataaatgtctgttgtttataaattacccggtctgtggcattttgttacagcagcacagaccaaggcaactgatgaaaagagctgggcatctaatacaaggtcaacaaagtggagcccttccctgaaactttcagactgagaaccacaaagaatgagggtcaatcacagaataaaactcaagagctggctgggtgtggtggctcatgcctgtaatcccagtactttgggagggaagctgaggcgggcagatcatgaggtcaggagtttgagaccagcctggccaatatggtgaaacccctgtctctactaaaaatacaaaaattagctgggcatggtggcgcgcacctgtagtcccagctactcaggaggctgaggcagaagaatcacttgaacccgggaggcggaggttgcagtgagccgagatcaccccactgcactccagcctgaacaacagagtgagactgtctcaaaacaaacaaacaaaaacaaaactcaagagctgttaattatcttgttctttctctgtgagaaggttggtacatctttatgagataaaggagcaaatggtggaaagagaaaggagagagacagagaaagagagagagagagagaggatttctggcaacagcatttagttcctagtgccagttatccctgagacccagctgcacccattctcatcccatagtttgcctataagagatatccagtgttcatctaataaaccccactattttcctaggcactttgaattagagtctgtaacttggaacacaaatctttgataaatgcatagtaactataataattattattattaatttttgtatttcaataggtttttgatgaacaggggtatttggttacatgaataagttctttagtggtgatttgtgagattttggtgtacccatcacccaagcagtgtaccctgtacccaatgtgtagtcttttctcccttgccaacccccccaacctttcccctgcgtcccccaaatccaatgtatcgttcttttttttccattttcattcttttttttaaaatttactttaagttctgggatacacggatacatgtgcagaatgtacaggtttgctacataggtatacatgtgccgtggtggtttgctgcacctatcaatccatcatctaggttttaagccccgcgtacattaggtatttatcctaatgctctccctccccttgctccccgtaactataattatcaagcaactgttatgtgcccagcacaaacgtaggtaatttatgattagaattccacttaatgctcatagtgatctatgaaattggtattactctcagaaaatggggcctaaattcaagcccatattggtctgtctcaaaagccagtagcaggtgagtggtaggcattcattaactgtagcttagaacaatacaggttcactggagtagacggttttttctccaggtgatgtgtctgactgacgttgaatatagactgtgtaggttcttcatgctaaggttagcaatctgtacttatttttttttttaaacaagagccatcagagtaatgcagtgggaaaagaaggcagcacgatgcaaatgtcatctctgcattcacatcagtcaattcaattcacttgaaaaacagaatagataaatcttaattttaatctttgaggaaatataaaattaagtcaaagtcacgaatgtaagtggaaggatatgtccggtggatgcattgtctatgtggtttattttttctgctgtcatctgagtgctaaaaatcaggtcccctcgtgtgtctaaatatcagccttattttaatggcattattctacttatctggacctgggataaaatatttcagtaaaaaaaaatatgcaggtgcagctataattatgtacctgtactgagtgatgcgagagtagctgttaattactttgcctttgaggtttgcagatcaaagtttctttaaataaaaaaatggtatatgtttgagccaagaaggtgaatcacagtaaaatatttaacactaactgcatttggctaaagtcgggttgcttaaaggccaaatttaccatacaaagtttaggactctgaaaattccatactaaaaatctgtcataccaggggcaaatgttcagatattattttcaagtctacgacccatgatgatcccttaaagagccatagtcaacctttccagttgctttgcaaatcattccagtttgtcagtcctttcaatgccaccatctcaatgacctagagcaggtgacaaatggtattactgatgtttttacaaacaaaaatttgctcagaagcattttttagttgtttatcttgttagtagactatattctgcagcttctatcatgatgcaagtgtctggataaatgcctaaatcaccagaactaactatgagtctttgtttattcaaatagcaagagagagaaaagcagtcacaacttattagggaaccaatgtctggaatgaactatatgcttacacactcaaacacctgcattaaagttctcttgagatgctagaaatgagtttgcaataactgagtcttgaagtatgtatctaacagatgtttgagtttgggaagatttcatgacaacatgaatataaaaatagtactgggatataatattaaaattttaccccagtgatgcagggcattcaaatagcaggtttgagcaaatatttattcatctgcttgctggtatttcatatacaaagttcaattatgtatgcactggaaagttatcccatcatatagtgcattatattcccaaggggaaatcaagagtgtcgagagatactggagctccacacgatatggttgtgtcaaagttcaacattggcatattaatcatgtagctgttctattggtgccagacagtatctcattggatcaacatacaataaattgtatgctcatcttcatctactaagatgttttctagccacatcttccaataaaatagccctgttggcccaatttgctgagactaagatgattttaatgtaaatgttttttttttttttttttttttttttgcagctgcacgtgtatttttgtttagggtgaatatgacagagtaaagaccacgggacctaagaaaccaaagggaaggagtgagataatctcaggtttgagttatgggaaggaattatggaaaaatcatgacatttaatctttagtatcttgcaaaataccaataattagcaggcatgaaggaagtaaataaatgagaaaatgaaaggatggatttagtaccttcaaaaaaatgcagaaagcttacctattttaaatcttacctatttaaagtatatctagtatgctagtgaagggaaaggttttatttggaactactgatacagtagtcatgaattctaataagaaaagcctacacattcatattcaaatttcagaaaatcaaagataatgaaaaaaattacaaaaaaaaatcagaggaaaagaccaccttatctacagaggagaaaagataaaaattgcatctgacttctcagaaaccatgtaagtacagagtagagtgaaacaagtaaagtgttgagaaaatcgaaacaaaacaccaaccaagaattctgtaccctaagaaattatccttcaatggtgaaagagaaagacttgctctgacaaacaaaaattgagaaaatgtgttgccagtaaatctgcctttcaagaaatattaaaggaagttatttagaaataaactatatgtcagaaactcagatctacataaaggaagtgcactgaagaatgaataagtaaaatcaaaatgtttagttttaaaatccttcaccgatctaacagattatgtttttttcaaagttataatagcaacaaggtatttgtgcacaaatgtgtgtgtgtgtgtgtgtgtgtgtttatgtgtaagtgaaatgaatgatagcaacaatacaatggatggggaataaatgaatttaggaatattttgttattataaggtacttgaactacctttaagatacttcctacccatgaataggtatattattatattaaagttgacataaattagttgtgaatgtatagtgtgaactctagggcaaccactaaaaaaatggtttttaaaaagtacaattgaaatgctaagaaggtggtaggagagaaaatgagattatgtaaaatgctgaattaaaaacacaaaagaaagaaaaggtgtggaagacaaaaaaataggaacaaagaataagggcaacaaatgcaaaatagtgacacatagagtacatgttaatccaactgtcaataagcactttaacatcaatggtctgaaaacatcgattaaaacagagattttcagagtgggtcaaaaacaaaactcaactatatattgcctacagaatcccttcttaaatataaatattatatagataaaaagtaaagagacagaagaaaatatgccatggtaacactatttagaggtagtaggagcagatatattaatttcaggaagcagatttcctgaaatctgaaattagagcaaggtaagtcatcagagatagagatggggcaatatataatcataaaggagccaatattccaagacgacacagcaatctttactgtgtgtgcacttaacaacagagcagcaaaatatacaagacaaaaaactgatagaaccgcaaggagaaacagatgaatccatgattatagttggggattttaatgattgtccctctttcagaagtggacagatccagcaggcagaaaatcagtatggacatagttggactcaaaactgtcatgagtcaattagatataattgaaatctatagactactttatccaacaacacatgatcacacattcttctcaagctcatgtggaacatttatcaagacagaccacatccagaactgaaaacataccttaagaaatgtaaaagacagaaattgcgcaatgtgtgatctcacatcaaaatgtaattaaactagaaatcaataacgggaagatcactggaaaaatcttaagatacttgaagattaaacaatccacttctaaatgacccgtgggtcaaagaataaatctcaagagaaaatttaaagtattttgaaataaacgaaaatggaacttatcacatgcgtgtgatgcacgtaaagcatgcttagatggagatttctagaagaatgatctaaaaccaacaatctaatattctgacttagaaaactagaaacaagaagaggaagctaaatcaaaagtaagcagaagaaaataaatagtacaattagaacaaacgtcaatgaaatagaaaagagaaaatgaacagagaaaatcaatgaaaccaaaaactggttctacgaaaagatcaataaaacgaataagcctctagccagaataattaagaaaaaaagagagaacaaccaacttactagtatcagaaatgaaagaagggacatcactaccaacccatggacattaaaaggatagtaaagaaatatgaacaactctgtaccaacaaatttgatgacctatatgaaacagaccaatttcttgaaagatatgtctgccaaaacttacacaagaagaaatagacaatctgaatagtcccatgttgactgaggaaattaaataaatagttaatagtttaataaagcaaaaggaaccaggcccagatggtttcaccagtgaattctactacatttttaaggaagaaattataccaattctctacaatctctttctgatgatagaagtagaggaaataactcttaatacttcatcattctatgaggccagcattaccctaataccaaaaccataaaagatactacaaggaaagaaaactacagatcaatatttctcataaacacagaagaaaaatccccaacaaaactttagcaaattcagtccaacaatgtacagaaagaaatatacgctgctaccaagtgggatttatcccaggtatgcaaggctggttaaactttttttttttttttttttggagatggagtctcactctgtcacccagtctggagtgcagtggcacgatcttggctcactgcaagctctgcctcccgcgttcatgccattctcctgcctcagcctctggagtagctgggactacaggcgcccgccaccacacctggctacttttttgtatttttaatagagacagggtttcaccatgttagccaggatggtctcggtttcctgacctcatgatccgctcgcctcagcctcccaaagtgctgggattacaggtgtgagccactgtgcccattcggctggttaaacattctaaagacaattaatgctattcatcacatcaacagactaaagcagaaaaatcacacaatcatatcaatagatgcattttacaaaatccaacacccattcatgataaaatctcttagcaaactaggaataggaagaaaattttaaaacttgataaagaacatctccagaaaacctacagctagcaccatacttagtggtgagaaactagacttccccactaaaattaagaataagtcagagatgtttcctctcaccactgcttttcatccttgtattggaaattctaaccaacataataagaaaataaaagaaaatataatgcatatagatggggaaggaagaaataagactgtatttctttgcagatgacatgatcatctatgtagcaaatacagaagaatcaacaacaacaaaaaagagaaaccaacttagcaattatagcaaggttacaggatgtaaggttaatatacaaaattcaatcaatttcctatataccggcaatgaacaaatgacatttgaaaataaaaccacattaccatcaatattagcacccccaaaataaaagagataaatatgataacatatacaagacctatgtgaagaaaactaccaaattccatatgaagaaaactacaaagatatcaaagaaaaactaaataaatgaagagatatttcatgttcataaatagagtcaatagtctccgaaactttgccaacatctgttagttttttatcttttttttttttctttgagacagagtcttgctctgtcgcccaggctggagtgcagtggcacaatctcagctcaccgcaagctccacctcccaggttcatgccattctcctgcctcagcctcctgagtagctgggactacaggtgctcaccaccacacctggctaattttctttttttcttttttttttttttttttgtatttttagtagagatggggtttcatggtgttagtcaggatggtctcgatctcctggccttgtgattcacccaccttgggctcccaaagtgctgggattacagacatgagccacctcgcctggcctgattttttaataacagccattctgacctggtgtgagatggtaactcattgtggttttgatttgcatttctgtaacgagtagagatgctgagcattttttcatatgcctgttggatgcatgtctgtcttcttttgagaactgtctgttcatgtcctttgcccatttttaatggggttatttgttgttcgcttgttgaattgttcaagttccttatagattctggatatcagccctttgtcagaagcacagtttgcaaatattttctcccattctgtaagttgttcatttactttgttgatagtttctttcactgtgtgaagctctttagcttaattaggtccatcaatggtggactgaataaagaaaatatggtacatatataccatggaatactatgcagccataaatagaaaggaattatgttatttgtagcaacatagctgcagctggaggcgattatcataagcaaattaatgcaaaaccagaaaaccaaataccatgtgctctcacttataagtgggaactaaacactgagtacacatggggacaaagatgggacgagacacctgagtctacttgagcaggaagggtggaaagagggtgaggatcaaagtactacctatcaggtaccatgctcgctacctgcatgatgaaataatttgtacaccaagccccagcaacatgcaatttacgcatgtaaaaaatctgcacaagtaccccttgaacctaaaataaaagttataaaaaagtaaaaggctaagactcaatattatcaagatgtcagttattcccaacttaatgtatagattaaacacaatcccaaacaaaataccagcaagttattttgcaaagttattttgcaaatactgaaaaaatgactctaaaatttatatgaagaggaaaacaaaccagaatagttaactcaatattgaaggagaaaaacaaagttggaggactgacactacctgacttcaagacttactacgaagctacagtaatcaagactgtgatattggtattagaacagacaaatagatcaatagaacagaatagagagcccagaaataggcacacacaaatacagtaaactgatccatgacagaagaccaaaggcaatacaatggagtaaagatagtcctcaatgaatcatgctggaacaactagacatgcacatattacaaaaatgaatgcagacataatccttataccttttgccaaaaggaagtgaaaatagatcataggcccagatgtaaaatacgaaactataaaacgcccaggagataacaaaggagaagcctagatgaccttggatacaacaatgtgttatttttattttatttttatttatttctttttgaacggagtcttgctctgtcgcccaggctggagtgcagtggcatgatctcggctcactgcaacctccgcctcctgggttcaagcgattctcctgcctcagcctcccgagtagctgggactacaggtgcccactgtcatgccccgctaatttttgtatttttagtagagacggggtttcaccatattggccaggctggtcttgaactcctgaccttgtgatctgcctgcttcagcctcccaaagtgctagggtgacaagtgtgagccaccacgcccagcccacaacagtgagttatttagatgtaatagcaaaggtacaatccatgaaagaaataattgataagctagagtgcattaaaattaaaaacttatactcttgactctatcaggagattgagaagaaaagccacaaactgggagaaaatatttgttaaaggcatatgtgattaaataaaactattatccaaaatatagaaacaattcttaaaatccaacaagaaatatataacaacctgatttaaaaattgcacagcatcatcatatgccattaggaaattgcaaattaaaatgaaacaccattacttacctactagaatgacaaaaatccaaacactgacaatatcaaatgttgatgaggatgtgatatggaacaacagaaactcttatttattgctggttggaatgcaaaattgtatggctattttggaagacagtttggcaattacaaaactaaacatactcttaccatatgatctggccataatgctccttgctttttccacaaaatgaattgaaaacttatgcccataaaaacgcctgcacatggttgtttatggaaactttgttaataattgtccaaaacttgggagcaaccaaagtgtccttcagtatgtgaatggataaactgtggtacttccaggcactggaatattatagagcaccgagaaggaatgagctatcaagccaagaaaagacataggggaaacttaaatgcatattgccaagtgaacgaagccaatctgtaaaaactatgtactgtctgattccaacaatatgacattatgcaaaaggcaaaactttggaggcagtaagaaaattagtggtttccaagtgttaggaggaagtgatgaataggtaggtttttagggcagtaaaatcattctgtatggtattatcatggtggatacatgtcattatacatttgtcaaaacccatagaatatacaacatcaaaagtggacactaatgtaaactatggactttgaataacaaagatgtagttaaatcaattttatgaaatctaccactgtagtgtgagatgttgacaatgagggagactgcagcagatttgcagcatgaacaggggcagatggtatatgggaaatctctgttgctaacatcctaaaatttctggaaaaaagatctaaacaactccatcagggctaagagaattgttctcaggatgagacaagctcttaaacatctactattctgggaaatgcattctcaaaaactaggccaaattggccaggggcggtggctcatgcctgtaatcgcagaactttgggaggccgaggtgggtggatcacgaggtcaggagatcaagaccatcctagctaacatggtgaaacccttctctactaaaaaatacaaaaaaaattcaccaggcgtggtggcaggtgcctgtagtcccagctactcaggaggctgaggcaggagaatggagtgaacccgggaggtggagcttgcagtgagctgagatcgccccactgcactccagcctgggtgatagagcaagactccatctcaaaaacacaaaaacaaaacaaaaacaaacaacaacaacaacaaaaaaaactatgccaaatttgattttgactattcaaaattgtatgtctgtgttgatgtgaaatctgagatctctctaaatgagatagaattatgactatgggctataaagcaagggagtggagccctaggaactgtatcaggttctcagcagaaagccagcatctccactctggggaagagaatgaccagtggctcctggggagagtatccctctgaagctaccttgactgttgtcgtcagcttctcatacttgaatccaaaaaagggacacaatgaaaatcaattttacatcaaaaattaataccaaaaccacaacattactttttttctaatagtgatctggggattcctactttgagacagacatttttaacttacgcatttgcttaggcttgtattaaatcattgtaaaccatagttttagtacttattctatttgatcaacctttacacgtctactagtttccacacagaatacttgggaaacttatagagtcttctttttataggaagaaaaactgagtcaccaaaatccatgttgtattttgagattaaatcaaaaataaaatctaaaatatgtccccatctaaaaaagtgccccctctataccaggaaacctaaagatcaatagcctgaacaatgctttgcattcaacttcctgagttgcagcagagttagtgaggctggggatcaaacaacgagggccaggcatggaggtgtggattagaataaaacaaaatgtgacaggaaaaaattacaaggtgaaaagccttttgttcatacaatggaacataattttgcagtagacatttttaagcttctattgtatcacacagtgtttctttgcaagatttcatgtgttgttgtgttaaaaatgaatttcattttgtcccaatcaatgcatctccccactcactattacctacaggccttcctagcagccagagttctggccaccctccagtaccaggctggcattaaagtaagtaaagttgctggtgtctgtccaaatgttcaatcgaggtagttgggaaatgtcacctacacccagataatttttaaattcctttctctctttttctttctccccatgctccgaaattacctccagcttatttgtctggctagaggttaatggaacactaatgatgttaatgagcctttcacagtgcaagttttttcaggaaagagatataatagctgttttccttcccttttaatctttttcatcattcaagagttacaggctgagacaattagcaacttgtacagctctgtctccctgctcagtcacagcccagtggggcaaaaagcaggagcccattagacagctccacatgtccacaggtgagagcgcatggatggatgcaacacagtgcttcctgccagaaggcataatgctattcagggagaaaggagggaaattaacaatctgttgatgaagcttttccatggcaggcaggcagcaggagctgtccagagtacggaagagtcatcataaattcctccccatcccttcattagaccgaaaggcatgagtgagagccacaaacctcaaggagttcagagtctagctcacccaagcatccaaatgtttagttactgagagtaaacttaccctaaattcatagggacctggaaaaaaagaagaacatttttataaaacaagttatttagcgatacatcccaattttttgggcatttctccattttgtggtgttttggcattctgcctgtctatgctttgaaagtatacatcctggatgcatatggcaattaaaacatgaactcagagtgctgctaagatggaaaaacattgaaagtaaaacatgtccaagatttgaactaatcttgattctgactcagctggtgttaggttttatttctggtgaaaagggcctataaatgccttcagcaaatgcttcaagaagaaattcagagcactcaacagagagggctgaagaatgtgacatttcactttccttcagattgttgatttattttgtatctaaaagtggattttaattaaatggatcatggttcacaaccaagttagagtgaaaaatattaaggcccaattcaagatcaaaaactgtaggaataattttcctataaaggtcactctcagtcagaattcaaccactaatgccagctaacttgagatgtaatataaagcaaaatattaataggccaaaataattttgtacaaattatgtgttatagatgtataatgaattgttaggcacattaagaatttgatatgtatccttaaactttatggtttagagaattgcctggaaaaataatcaaaggtttgttcacctactatgcgtgttcaataaactttacgcttgctgagatggtggctaaaaataaaatataaggcctagagctaaaatacaggggtaaatgcatatctgaaggaattcagacaacaattaattatgtacctgtggtgccgataaagctcaaagttcaaggcagataaagtcttattcagactaagtgtagttgctgagggcttcattaacgaggttatgcagtgtaaacaagatttttataattacatcatacaaaaaaaagattttctaggttcaggaaatgaagaaaaggtataggttgatttaatcatgaatgatagatgcatgtgagaaccattgtttagtgccagtgggcagatgaattgaaatgagcagaaatcaaaggtaagggaattgtcttagagagacttgccaaggttcagaagtaggctgaaaatggagatggcaagatgtgaagatacattcagaatgaaagtattaagactatgacaaatttgatttggtggaaaaagaaaaatggctcaaaaaggatttagaggtttttagccagggcaactgaaattattgggttgcaaaagaaaaagaggctgggcacggtagctcatgcctgcaatcccagcattttgggaggccaaggcaggtggatcatctgagttcaggagtttgagaaaaggctgaccaacatggtgaaaccccatctctactaaaaaatacaaaaattagccaggcatggtggcgggtgcctgtaatcccagctactcaggaggctgaggcaggagaatcgcttgaacccgggaggcagaggttgaagtgagccaagatcgtgccactgcactccagcctgggcgacagagcaagactccatcttaaaaataaaaaaaaaaagaaaaaaagaatacttttgtagaaaatcagtatgttcaatggtgccatttttaaaataacataatattttatctagatccactacagatctggccaaactgaactattataatgttttaaaattcctcattccccgttctaacagttgctccaattgctcaatagtgcatatataccctctcacccatttaacaataattttatcaatttacttcggtcaaaaactcattggaggaaaagaagttttatggactgtgcagttgcatatcatcatcaacgtatgctcacgctgtccatttgggcctgcaggtttctagaaggcaagcattgcacccatttagcaaactctgatatgctctttagagtacatggaaatacataacgcagactttctgcaagaaatgatgatggcaactagaaatagtcccaaagaatttatcaaatgccttagatggtgaaatcagagctcaagcttttatgcacatcgcatccttgttttctaaagaaataacaaactcccctagcagtgtaaggaactacataattgtgtatatggggctgcagtgcttatagcaatgtgctacatccagatggcaaatgggatgatggtaaagccaggatgaggaagcaactaatgatacttcaaatagcaaactgcaaagcaaatgtaagcacaaatgacatatccaggaccagacaatagagcacatgtcaaagtcagctgcttaggatgggggagtggagaagacaaaaataaaaagtaaatatacactacataaacataaatacaaatgcatgatactacttcagaagcacagcgcttatcagatctgctgtcattcccctcgccttgtaccatgcctctcttggcctagccccactcaaggtaaaatagactgcagactgcccactgcaccagaggcagagacaggccctttgttaactgccatgaagggaaagctctccaaagaacagctactttcaactcagtaggtaatacgttccggtcttgggtatccccacctggaatcagggaaaacaaggccaaggacctctagatgaataatacttggatcaacagggaactctctctagccccaggccaccttctcttctccatccaagaggaagattgtgcaggacacctatcctgtggtagaacagtgggcccttctgtagtgtcagtggtgaacacgtggctctatatttagacaaactctgaggtatagaagtagattattaactggaacttataaggactgaagacttctgtttgtgattttcattagaggacatctatctgcatttaaagctgctgcactctgataacggggagggagagactcttcaaaactgcctggacagacgctgagataatgcttttcaaacgacaaaatgccctcactgatttacagaggcattgctgtccttgtccatgcttctggagctcctgatacaagctgtaagaagaaacttctcatcatcaatgaatatttctggccccaacctatttatccagacaacctgtcagcccaccagagccagattttctgttgacacgcacacgacagcaacacaatagctgggtttcttttcttcattgttgccattcacctttccctcttcatagtcacagacgctttgtctgaacgataataaagacccttcctgactcagtttccattttgacgttgtcattcctttcactggctcttatttatgactgccttgaagtgctttcatgaaaagatactattacagcagaatgatgctctcttgacactgaagattggaatctacacaaatgttctgtaacaactcattttaatgtttgcctacttgtcttaatttattttttatttctgattctcaacgtactcgagacagagggaggtttgctccagctcagggagccatgccacacatctagctgagaccacagatggtgtgggttgggatgactacctctttttcaggcttggagtggctattggtatgcagcacacaaccccgcatgctcatcaagattgttaaaggaaagggctcaggatgcacaaaagcagagcagccaaattattcttgtttatggcaggagagggttcactttagatcaagacagaagtaaattagcaaagaaataagccttggaaaagattttcttttttaaattttagaaacaaggctggcttacgtttgctgatcagtgtcaaggtacactttcagatggggccagaggagaattgctgcgaattaatatgcaactcagttttcagtcttagtccttagaagggtgttgttgttcttctaggtgactgtatgttgctaaattataggattcaaagtgcacagatacctggctacacatttacttagtggactgtcgtcagacttttggtctaaacatacctaacgcaaatttaattcttcccactaaaattgcaatcaacaatccatcatacatcaaggaggaaatacccctgaagtctcctgacctgagctcggttagaatgtcgtgcgctagagctttccagcggggtaaatgggagcgttaggaatcttgtaaagaagccactacattatacacacacacacgcacagacacacacacacacatatatggctattccattctgagcctacactaaccattgtctggctcttcctcagatcccctttactcttctgttcattgtctgcaagtataccacacttgctgggttttaagtcacattgagacaaattccatatttaattaatctttttgtctcccattgttaccaaagacagcgctttgcaaactacaggtgataaaaaaaaatgtgaaatacataatgaaacatattttactaaccacaccagacagggaaacgcattcacggagtgcccgctgaatacgtgtttccatatgcaggaagcctgactccactgctcagggccctttgcaggcctcatgaggactcatccccaagctaacagtcttaaaacaagactgacttacctgcgtttacctgttttgctctctaggtccactcttaatgtctttactgggtttcctggccgctctttctatttttcatgaggttaattggtttctctagctcacaaagttttccttctgtgttctctggttagtttttattacctgctcccactgtgtctggagttggttccttccggtgggttcgtggtcttcctgacttcaacaatgaagccacggaactttgccgtgggtgttacagctcttaaatatggcacggacccaaagagtgggcagtagcaaggtttgttttgaagagcaaaagaacaaggactccacagcatggaagaggactgagtgggttaccgctgctggctgggggtggtcggcttttattcccttacttgtccccgcccatgttctgtttttgtcctatcagagtgcccttttttcaatcctccctgcgattggctacttttaggatcctgatgattggtgcattttacagagcactgactggtgcgttttacagagcactgattggtgcattttacaatccccttgctagctactgagcgctgatgtgtgcatttttatagatcactgataggtgcattttacaatcctcttgtaagaaaagttctccaagttcccactcgacccaggaagtccagctggcttcacctttcaccatgaccccaaaagagtgctttttgggtagtctacctggtgacctgacctctttggcattgcctcaggacttatccatgattttgccctgtcaggaagcattgttgaaccctggaagatcagacctagaaagggaggtgagtcattgcatttgagagtgggaatgtaaatttaaatttatctcatccaaccgtctattttgcagctgaagagaataagccataaacctagaggagatagaatgcatagtacttaatctcaggaagcctcaagcccagcaattttgaaccaaagacaattttgctctccataggacatttgacaatctctagagacatttttgttcgacaggacttgggtgaaggatgccgcagaaatctggtgagcagaaccaggaaagctacacatcttgtaatgcataggacaaccctgtacctataaagcatatttcaatccaaaaagtccactgtggtaaggttgaacaaccctgttctggtccattaaggtaacatgaagtcaaaagacatggataaaataaaaatggtaaatttagtattttgagatctggagtacatattgtccacagagtaaccaccttagaataataagtgctcttaatagtggtgactatggcactatgtttaaatattgatgaacaaatgtggtaccaggagcaccttacattcgagtacagaaaatatgtgtcctccagttttgttcagcctggtgttcccacagcatgaacttgggaacttgcttgttgttgtgtgacttaggctctgagcccatagcagaggtcacaggcccccgtgcgtgatcctacatttattctgacccataaactagcttgccatgttagtgaaagaaggatagtgttttgagaagggccttgatcttaaagtcaaggggttggtctctgaactccagctcaggtggggatgttttacgtgactgggagcaagtgcatcttctcattctgggttcagtgtgtttcattcgttcagtgctgcaggggccctagcctcaaacgcagtagctccagctctgataatctatgggattctttttcctacccccaaacttccctcctagatataagagtcaggtggcaaacaaattccctaacagcatttccctttataaactggagcaccactaagggcatgactaagtagagaagcacagaggtgtgtggaacagggaggcatttggggttagaaacctgactctgaacactcattaaccccatgccattgggcagttagtaaacctttctggtcctttgtttactcatctgtaaggtgggaatgataataataatacctatccatatggtttttgatgagaaaaactgagataataagtgcaaagtgattagaacagcccccaaataaggagctgaggtgtttctgggtcaaagttagcaacattattctcctcctctaagccagtttgttttccatggaaaatagaattccgaccattgttttgggtaatatatttagttctgtgtgaatgagaaaaaaatgcacaaatgtgctatgaccccagcagaatacttggtgccatttacaatataatagtaaaagaaaatcatttacccactggcacggtagctagtttccctgtctattccagttccatatgtcccttcactgtaatttagactaaaacacaagtgtccctgggcaaatatgactccctttcttttgcttctggctggggagagagcttttccaagatcacactccctgtgtccctgccctccaagaggtcacttggctctttcttttggcatgttgtccccagtgttagttagtacgagtctttctcagataccagctctctcattagttctattggtttcaacagctccatggacacagtaaatgcaatatttaacacccaagagggaagtgtttcacttggatgattctttcatcatctctgcccatctggagctccctttaaactcatggagcaccaactgcctaggaaaacaatgaactttggtgacttttcctttcctaagcagactgggctcccagaaaataaagttggtgccaggaagggtgttttgttttgttgtttgtaggtgggaggagagttgatccttcatagatgatattggttccatcatttcctagggaattgcactgagatttgattagatttccacctttgattgacacctgttaataacctgcaggatgggtggaggatgtttatattgtcagccagagttatctgtgactatttttcatcagttttgccaatcaagggcagcagtgaaggatattatttttttcttaaaatgttgttatggatctacagacactggatgggggaaattgtcctgtacatccaccttcacgctggttcttagaaaatatattgccaggattgcatgcaatattcaaataatgcatttatgtacttttattatcctactttggatatggtgacaggcagctttgtgacaaagctatttattccctatattaatcttgggagtatggttccatccaaggatttttttcgttaattagactttatatttcaaaattttttctaaacaagactccaaccttttgaagttcaagttcattgactcttggccaaaaaaaaaaaaaaaaaaaaaaaaaggggaaagaaacaaaatatctcatatcacttggaaaacacggttgaatgtaaaagcagaaaaataaacgttgatactaaaaatcaacatttgttgtgatgctgagtatatgacagatgaaaaattagtagaaaatcagcaacatttagaaataaataaaaagtacaattagtcttggtttttccaaaatcatgacatcttccaaatattgtagacatgggcaaaatgaggcatctttcagatgttttcttaaaatataagattggatttgtataaataaaaggtgtcagcatctagtgagctaaaagaaaccctgcaatgagggctatttgccgtgaatgctttgataggtgaatgtcccaggttcaccagtcctggcctaaggaagagaacagcttcgtctttctctcacactgtagtgccatcacacctccccctgccttgtcctgtctccagcacttcaagagaaagtgtctaggagagccaagggcgagcaggttaaaggacaccgagaaactcttaatcgcacaagctccagaagagtggactgtcatgccccctaccctttggaggctttcgctgtgtcagcctcagccagcagccccagaggaaaggtcagatgacacatatcttccccttactccatgccagacctgggcagattctggtattcacaattcccatctgcaatttatctgcaattacagaatatatatgcccctttcatctagatttcctggctaaagtgaaaatatgccaaatacatttaaaaataactcatttaaagcctggtgacagtgctgggtctgttcctacttatcatgcaaaaaagccatcctttatattttgcctttccccagagctaaactgtatgggtataaaattttttccatctctttccatctgccttattttggatctgttttgccattcagatatctgttttttccccacactttcttgaaattacccttaaagagcaatggggaagttttcaaaaagtacaattcattaaaagactcttttcaatcaatcactcagtcttctatttacctagagcatgattttagccctgggggttttgaaacttgagaaaaagggagaagaacaaggaagcaggagagaaaaaaataacagaactacatttgtttttagaatggtttcagacatgtgtatcattatttaattctttaaatgccactaagctgaacgcttacacagaaccaagacataaacccagattttctgactcaaacttgattgctcttttcatagtagttcagaaagaaagcaaggaactttgaccaaagctacagccaaacactagcaataattaactggctttctgttgtcgaaggataaggcaattttgataatgactaagggccaaagagtaaacaaagcctaaataaattttaagatttgtcttagcttcccaccgcaggtaagaaagtatttatgactctttccccacagtgtgaataaggctgctcactttattagccagctgagtgttctgacctctgtgcttcaggcacatattgaattctttcttcattagcataaaagtaaatgcatcgtctcttcctgagagaaccattcttagaaaagcagtgcaagctttttagaccaccttgttgatatttatgaaaacttggcctcatgcttgggaagacgctatgattacgctgttgtctatctaaacaagctcctccctgcttcttcagaaacagagcataagtacaaaataaacagaataatcattcctgatactggcagttgtggaagaatttccacataaaccttataatcttgttgctcacagaaatcttatgcgacagtcctgaaccagttctgcccaaagcaacatcactgcctgggcctccccctgaactgctcgctctgctgctgtggaaaaggcacccacagccagactcccagcctcccagcctgctccttctatggtcttccccatcccagtcagtgccaatgtgtcatcttcccagttgttctggccaaacttttggggtcgttctgacgtctcttttttttctttttttaacatcccattctttattcatacaaaatcctatcagcactaccttcaagacatattcaaaatcttataattacacaccacgtctactgctaccatctgggaccaaatcagtctcctaactgtcttcttccattgcctctaattgtgtgtcctgaacccaggccagagtgatcatttaaaggtgtaagccagattaccttcaaaacttgcaatggtcctcatcctattctcagtaaaatacatggcctaactgctcccctccattttcccctatccaatgcctctttttacaaggcataagatccagaaagatagaaatttgcatctaattcttttaccactgcatctttaaggatagaatagtacttggaattgagtgggtgctaaataattatttgttggatgaattaagaagtaggaggagttaagagtctcaaagcaaatggttgtgagtttcagagagagtggtagtttgagtaaaaaatgaaagagataccgagaaagaatattttagatgttttgttgtacattaaaaggtaccctgtccccatttatgttttcttaaaactgaagaaaacttgaaatttctttcagttctatcttttatctgttggtattttgtgcttttgacttaacagtcttcaaacactggatcatgtaggattttagttaaattctgcttataaattatttgtaccattgagtgggaggtcaaaggacatatgaaaagcccacactgacttttgccatatatctgcacccacttgtttgtaactctttgatctacattctagctctgagccgctcagcaaagctacctgcatcctgatgctatccacaaagggaatttaccaccttggtctaggatcatgaagcctcattgcccttcaggttaccagaggactgggcggacatccagcctgccaggcagcaggacctacagggtgtttgctcaaagcccttggcaagcccactgctcatgcttgtgcagcctattacagtaatggaggtgaggcagatgagagtttccgaggaaccgatctccccggagtagattcagtgcctagaatttctacggaagccacctgagaagaaaacaggtctatctgaagtcgaatgtgattaacaaaacaaacaaaacaacaacaacaacaaaaacacaggcagagctatataacactcaaaaaagacagaaaaaaaaccctaattctttcgtatcactttgggaaatactccatttcccactaaaaatcagtgatgaaaacaatcccctaaggtggctgaaaactaagggaactccaaatttagctgaattgtcacagtgtctcaggattgctttgaattattttttaagtgtaagtttatttatatataatttaaacttagaggaaaaacatgataaaatatcttatagaatgttacccagattcactaattggtaacattctgcataactttatcatttgttttcacatgtttacttccttatataagtaattgagaataaattataaatcattgagaataaatttgagctatcatgcccgtttttcccctaaaatactttagtatttgtttcttaaaaataaggacattattattaatatatatatatttttgagacggggtctcgctctgtcacccaggctagagtgcagtggaacgatctcggctcactgctacctctgcctctggggttcaagcagctctctgcctcagcctcccaagtagctggaattacatgcacctgccaccacgcctggctaatttttgtatttttagtagagacagggtttcaccctcttggccagtctggtcttgaactcctgacattgtgatacacccgcctcggcctcccaaagtgctgagattacaggtgtgagccactgcacccggccaagggcattatttacacaaccatagaaaaattctcaaaattaggaaatgtttgcattattatagtactactatctaattcataatttctatgcaaatcaatttctcagtagcatcctttatactctgtcatcctggttcaggagccaatccagaatcatacactgcaattgactgtcaggtatctttagcttcctataatctgcaaccttcctccagctttctttcttttaaaccttaagtattaaagatgcaggccagtcagtttgtagaatgttccttaatttaggtatgctggatgtttcttcactattagatgcaggttatgcgtttttggcaggaatacctagaagtgatcctgtaatcttctcagagtatctcattaggaggcatgtgaaataggtttgttccattactggtgatgttcactttgattacctgattaaggtagcatctgggaagtttctagtataccaagttactattcattttttctttgtaacttataagtaatttgtgggaagatattttaaaactatacatatatatatatgtatgtatcttgttcctcctcagacattcatccaatagttttagtattcattgatgattattgcctgaatcaattatttctgtggtggttgcaaaatggtgatgttttgattccaccttttattctacattgttagttggaattatactgtagaagatattttttccttttattccatgtagtcattcacttattctgttatctatttaattccatacaactcattaattttattctactcaatggattaacatctgctatttttgttacagtctgttaaaaaccatttaaaaaaatttttaatactcaaattatcccagatttggttaatgggagtcccttcaagttggctcctgtgtcatttcaaatgttctgatggttttgtgagcacttctttattttgtggaccatgaagatgttctaggttcatcctgcagaccctagatccatccatttcagcaaggagtttgtgttgctactgaatagcttatatacttcttttcttcctcatttatctcacagcttgaacatttaggtgttctcattgcccttgaggagaacctgtgatggaccagagctttcggggccttcttataaccatggtcctaaggtgttcccatagactagcactgagctgtgaagggaccaaagcgaattgggccccatcgcagatgcccaattctccctctctttctctcactctctctttcccaccatatacctatttctgacataggtagtttttcgatgttatgctcatatgagaagtatttacctagctgaattggtcatgtgagagcctgattttaaacctactgtgggagcacattcgagataatttcacttgcccttgggctcagagtgaccagtttggtaatcactctcaaaataaaaaaagtattatcaactgtaggaaatgaaaatgaaagtaatgtacaattgcaatggaatactaagcaagagaaagtgcttagatcagaagcaaactaagctctaactctggaataattacaataataccaataataactgattctaaaagtatcactggaaagttttgcagcactttatcaaatgaagtcttcaaataatattcaaaaagatgtttccagaagggaatgggggctgtccaagttcccccatccttggggaactgcaagtggaggagacatcaaatagcagcttttgttttcaacctgagtctacaggggtgtgaagtttccccagcaggtgaaacactcttcagaaagaaacatgccgcagtctgagtctcagctctccctgattagcaaactgtgactcaggtgaaacttctggactgcaggaactacttttgaatatgtctctaaaagtggtagtgcagtgcctgtttccatgtgtaggaggccctgttctttctgggactctctactgacatagctgggatatatgtctgtcctgggctttgttcacatcatatgagctgtagggaggcctctatgaagaaaattctgtcttttgagagttcagggcccaggctggtgcaaggacatgccggttgtttaacggtgagagttataaactggagtctttctctgtgtcagggctggccttcctttcatggagtttacacaatggtcctgattaaagtggactgaaaactggaaaggagactgaatgcctccatttggtcaaggagacaggatggagagaattgctcagtagcaagactcatggagacatggaagtcaagggggctgagaggtggtgaagagtcctcctagaggccgcatgtatggccatctgccttcacaagatgctctcttctcacatggagtggatttttaccatatgaaaaaaaaaaaagtcttgtccccagttcactcccgctcagtagcacagaactcccactcaccctgcaagcagctctgcagttcttccttgaggtggcggaggcaggaagctggctgacagctaagtattcctggccatgcctccctctcccaataaagtgctctctggcagccaggaacacagcaaagtgccctcctgcacagacccacacatggacgtgatccagtggagaccctccaccaagcaaatggctggtcttgtttttaattcaagtattaaaatagcagtaatttggcactgattagcaatgttagtcccgaaggccaaaggaggactggctttctgtgtgaggctctaaacaattacttcctttggataatcacttttttagaggccaactgtgcatataaatagcacatcatgccagcgcttggcaagttttttatcagcatcaactcaggcaacttctacagccatcgtgccccaggctctataaatggcccatccctccagccaagcctgagacaaacatactggccaggagactcccagagaagaggctgagagggctcaggcacagctcctcctcagattctcatggtcctttgctcaggggccaaattatctatatcacttatctatgtatctgtatagatgtatctagtatataatatctatatcttttcaaatatacatttggaattctactatttcagaagggccttctgtccctgatttgaatgaacctggagccatatcagttaggaatgccataattagacagtaggactaggaatgcaaccatctacccactcctgggtcccttcatccaaaggttaccaagcgcttcttggtacgcagcccagcccagggcactgggaattagtaacatacttgaatataaacaaaaccctccgatttcagcagaggggagaaaccattcacctgacatagtgcaaacagcatagggcatatcaacaaggtataaacagagtcttgcgggacaatttcaaagtgtaaaattcagcctgaggaggggaggcgaggaaaacttcacaaaggagatgactgaactgaatcgtgagtaatgagaagttcaccagtcagagaagacaggggcagaggctcacgtgaagtcaggatggggaagactgagttccatgttcacgtcgcacaggatgcacgtgggagtgaagtgggcggtggagcaggtagcgggaaaggtgagcgggaaagggcaggtagggctgcagggagagaggggtgatgctgtggggcagatgcaggctcttcctgccagtgcagaattgtgtggagtcaaaggaaatgaaagctctaggtccatctttttatgcctgttcactgctttgggcctgatctggaagcctgaaactcaaagacagcagaatcaccagtcctgcttcaccactacccataaaagttcaggttaagagctgaggtctacagtgagcctctcagcctctgggtccccagagaatagcttcttatctattggcatatatacatgtatatgtgtgtatacatattctaacatatatatttgtgtgtatacatacaaacacacatacacacacgcacacacatttactgagcaaagcagtttgcatctaatgtgtataaatatcatttccatttcaaagacgagtcagttaataaacaaatacttacaaagcagctaaaatgggcaaggccataggaactagggttacagcagcagcattgccctcatggagtttaaaatccacttggaaacatacaagagctaagctttcccgagcacttaccccatgccagacacagcttcaagcattttttatgaatcaactgataggattctctcaaccactctagacagcaggcatggctgcctccagggcacatgctagctgaagtgcagctatgttgaggcagtcacccaagaccaccacctaggaaatcatagtcaataattgaactcaggagacctggcttcagtgactgtgcttttaagtaagtgattctgttcttgaatgaatgaaatcagtttggaggggttagttttgtgaacatcactcagtaattctgatgtgtcaagagttcatgctttggccagtctactatgatcacatacatctcagaagttttcccagctggtgagagatgatctgttttcaggaccagagcttccaatggccaggaagatactgaacaccatcagttctgatagtcacccacaattctacttacttacggtaattcactaaacaccccatcatattaattctttttttagacggaatcttgctctgtcgcccaggctggggtacagtggtgtgatctcagctcaccgcaacctctgcttcctgggttcaagcgattctcatgccttagcctcccaagtagctgggactacaggtgcgtgtcaccatgtctggctaatttttatatttttactagagacgggtttcatgttggccaggatggtctcaaactcctgacctgaactgatcagcccaccttgggcgcccaaagtgctgagattacaggcatgagccactgttcttggcctccatcatattcatttagctatgggatttacctagcaaaccatagcatttcaattaatctataactgcacagagtcacttcctctgtctggcagaaactttctagaaatttctactctgtcagtcatcaaaacctatgttatttactcacctatctccttagtgaatgcctgccaagaataggtattcgttacgatagataaaagatatcctcggaatgtcctgatacacttcagacaagtcccagctgggaaaactgggatgtatgtgattatagtagactggccaaagcatgagctcttgacacagattagaagggggtgataggaatcctgggccgagggtcaacatggaggagttagagactgctacatctgtttattactattcacacaatctcatttttactccccaggctggtgagatctggggaaacagtttgtatctaattagattacattctcataaatattttaatttacacttgataacactaaagttcatttgtttcatgcctacccatttaaggctcttgaaatctgccagcatgttttccagatgaataccatttcatttcttgacaatccttaagaccttctaaaatatttgagattacaaaacgtcttctatttgacaagtggtttcagaaacaatgccccaagcgacttctaatgttaacatttctgtccccaggaaagtgatcatttataattacgccttatttttggcccttaaaagttacaaaatattcatgccatcttcttatgattatttgaagcatattgatgtagggcctggtcaaatgcttattgaaaacccatattttcaaggctcccatattctcatatatatccatataacatttgagaaagcaacttaggaatagtgtaaaattgttgttcctggtaatagtagagataacactagtcgaatatgggtagttgtccttgtctactgcactgtgtttctgaaaagagcatgcatggtggtaatcatatagacatggacggagcttgggattcttgaattctagttccagctcagctgctgctggttgcccaaccttgggatagtcttgggggagcagtggctaatcttcttgggacttcctgtttttaatccatagtaagagtggtagggtaaagtcttctccaagaaaaatggggtttgcagtgtcatcctgctggctagtaacagacctagaattgctgagtcagatctctagttccaaaacgtgagcatggaagttgtcaggcacttctgggcaggaggcctctgatttctggttgacggttctcacatcctcctgggtgcttagatttctcacattccagcacatgcacatggtctgacagtggttcttcatgaggagcggaggtggggagcatggagagtgtgtgagagccacctgggcacctttttgtcaaaatatacttcccctccctatacctttcctcttctctccagcacaactcagcgttgatttacctagctagccacttgttaatttccagatgatgctgacattcatctcccaaatccacctcaactagaaaattcaacatacctgctgtcccaggtaaactggaatctagcatctctctcaataaaggcttagcaaaagttcgctgacactgctatggcatttggccctacagccagcgagtaattctattctccagctgctttcagcattataaggtattcacattcccttttcatttggaaatcactagcaatgtgcttctaaaatactgcaaagatagatattctaaaattctctcagagccttctgaaagcagaaataatgtttttccatgactttttcctacaaagtgacttggaaaaaatatttcaatctgcagaatcaattccctctcagagcagtgcatacactgtgacaaccccaaggacatggatttgaaggagaattttctcctatgacatcatgcagtaagaaattccctcaattccagacactttattgattatatggtttgggatcagccagctcatttgggtgacagatgattcttgcccttgtgctacccttgtatttctcagactttaaaagattttgaaaagatcatgaatattaaacagagaccctgggtgaagaaattctcatgctagggaccatattgttgtttatcaaagtctgtttgtgttttatttagatgcgtatttgctgggtagtctttttattgtttgccctggtggaaatgacaacccataaacacattttacaaaatctttgcttttaagatttaaacaagggatgtgcctgagccaagggcagcacgcctccgagggtgacaagctattctggacgggttccccacctccctcccctgaagctgttttatccagggccatctggtcagcccggcatgcttggaggagcaacacaggggtccagatggatgggttcttggagagttctttaaaaacccatgcacccaacccctgaataaccatatgccaaaaggtcaccgcctcctgagtggcatccttcctgggtctctctctgtggttgttcattcggattcagcaccctggtgctttaaggggttatggggttttaattaattcattattataattatcctaagtgctggtatcgttggtatcaacgttccatgtcatctgaggtttcagaaaataaaaccagaaggaggaagtgggatatactgagcggtctctgtgccagacaaaagcagagccacccccaagaagttggcagcatgagtcgggtcaaagactgtcagttttgtcactatccttcaacatgaatgccagcaatgactaccacaccttaaaggcacagaaaatggtgttatctatgctttgcaggtgggtacccaatggagagaaggaaatgtaagagaagagtgcaaatgagaggggggattagtctacttctcccatacttaagccataccctcaggaaatttagaaaaaaaaaaaggcattttaagaaagtgaatttattctctgattctcttaagtccagctttccctgaaggtgaaggttaagcagtctgacatttacagttgtctctcagccctagggttcccccatttcgggggctctttgcaaagctctcagcaaattcattaggatgcagccaaccacagcagcctggtatcaggacatctcctctgcccagggcaccctagacccatctttatggcttgtctgctacatcacagattcagtggcccctccccagagagataagtcaatgcaacctcaactggtgacttgctatgagtggcacacacttcacaagggtccctcaacagtgtgaaaaatctcattaaagcctgacatttgctgagcatcaccagagggcaaaggtgtccgttccaatcacagagccccactgcagagcccagcagacagtatgggggcattgagactgagctgttatcttcaggccccttgttcctcagccttcatcacgttctgcaaccctgaaaggctcatgcacccttgcagaacccatctgatttggatcctcaaaatattttcctcacctccgccctcccatcattttcctcatagtctccttgttcaataactttgccagtagtttgttcaaaaccagtgtaggaacctgaataatctttccattcaatttctttctacttgcaagagaatggagagacctaaggaagagaggtcttcccagtggacacccaatgaggagtcacttctttcctgtgtgtacttggacatattgggcagttgtctctgcttaaaccccatatgggttgggaattcatacaaataaggacaaaaagccccaatggcctaagctccccattgtccaggcaaccgtttggaatggcgattgtaatcactggagatatactgattggctacaatcctggttctaagaagcaacgtcgggaggtagctcctttctcaatgctttggatgtgtagagagggtatttaaactaccccaggaagttgaggaggtcactttattatatagacttgcatccattttccctaagtgaaaacatcccttccctggattcagttgtggttaattaatcaaagccattcccagtgtctatgtttgagctttacctaccagaactctttgtaattcagcctctatctctttttctcttcctctctaccccaccaatgctgcaaacattctagcacttactgcatcagctacgtattcatgttttacatacagaatcactacttttcaccaaagcctgcaagatatttatatcatcattctataatccctcccctaatggttgtatgtgaactgtgtattagtgttctccagagaaataaaactaataggatatatatatatataaaaaatatagacacatgtatatatatagtgtgtatatatacactatatgtagtatctagtatatagtatatatacatgtgtctatatatacatgtatatagtatagtatatgtatatagtatatatagtatatatatagtgtatatatatgtatatagtatatatagtatatatatagtatatatatacatgtatatatagacacatgtatatagtatatatacatgtatatatagacacatgtatatagtatatacacatgtatatatagacacatgtatatagtatatacacatgtatatatagacacatgtatatagtatatacacatgtatatatagacacacgtatatagtatatacacatgtatatatagacacatgtatatagtgtatatatatacatgtatatatagacacacgtatatatacatgtatagacacatatgtgtatatatacactatatatatactacatatacacatgtatatatatgtaccatacacacacacacacacacacacacatatatgagagagagagagattatagaaatcggctcacatagaggttgaaaagtgccacgttctgttggagaaccagaaaagcaggaaagccagtggtataaatcagtctgagtctgaaggcccaagaatcaggagcattaaggttccaggtctggagaaggcgatgtctcagctcaaacagaagcacattttcccttcctctgtctttgtgttccactcaggccctcgatggactggatgatgcccacgcacactgtgagggtgatctgaattcagcctgtcagtttcagcgctcatctcttccagaaacaccttcccagacacacccagaaataatgtgtcaccagctatctggcatcttttagcttcgttgaattgacacataaaattaatcatcacaaacagcgcacagaaaagcacagaggacaatggacaaatgcatatgtgcccatcatctaaatgtaatgtgttacattctgtcacttttactttagacattattaaagaatggataaaaatcttacagatacactttaagtctcttttgactccttctgcccaatcccatataagcagccactattgatgtgtatctttcaagtccatattttaaaattctttctgggagaacaatgaagtgattgagtaacttgcccaaggctacccagctacacaaagatactgggcctggaattccagctccctcctgggattcgaagccatagggacccacgggcacatgcaggagcttgacaaaggggtagcaatggaaaaggtgcatgtcatcactgaaaaagagagtgcctggaagaggggcaggtagggagagatatggttctttttaattcagcattctggcagagaagtggtgggatggtactttagatggcatccacattttcactgcatggccagctctattgacactacctcctttttcccatctccaaactttcaaaatataatgagagtatctgtaaacctaggaaaggtaacaagaagctgtccttagatctgcccctttccctcttttgatccatcatcttgtacttctaggcttaaatggctttgccatgtcctgcagtggatattcttctagatccctggtaatttaaagtactattattctaaagtttcaagagccaaccattttgggtctcctttgtatatctgtcaaatgatgataattataggtcctctgagtatctcttagggtcatttgaaggagaaaatgagtccaaagtcatttatcttggccgggcatggaagctcatgctggtcatctcccagctactcgggaggctgaagcaggagcatcgcttgagcccagtagttcaagatcagcccggcaacctggaaaaaccctgtctctacaaaaaatacaaaaattagccaggcatggtgatgcatgtctgtagtcccagctactcaggaggctgaggtgggaggatcacttgagcccgggaggtggaggatgcagtgggctgagactgcaccaccgcattccagcctgggtgacagagagaggctctgtctcaaaaaaaaaaaaaagtcatttatctaataaatatttactaattatctacaatgtgcacaggcttgtgctactagggatataaatgtgaacaaaacaaattgctgtcatcacaatttatcatctaattaagaagaaaaaaagaaaaacactaaaatgtatttttctaaaaggggaatataagggactatgcaagcatcaaggaggggcacctcatatggacataagagataaatgataacacaggcttccaaacggggctctgagtgacgggtctggttggccagcagaagacgggatgattatgcgctttgttccgcatatggaagacaatgtggtttttaagataggctggtcctgcggttcaggcacccatcagtccacatcaccacagcatgactgttttcccttgagttttttcaggaatcccttatgtgatcttcagctcccctccttgctgtccttagtcctgatactctttaccgcaggtttcctcacccattggtctccagcacctcacagtgactgctgagagtggaggcatactgaaaactgatggaataaaggaactaatgaagagtgccaaatgcattggcagccccgtcccctcatgcccaagggattcctcaaatacccctatggaggtggaatccagattcattgctcttctgacagttgtcctaatgcctgccttgcagagtcagtctgaaggagctggcaaatagctttctcagcctccccttccatttcgaatgtaaaaagtaggagggatgaaaaaatggaaggggaataatctccagaaagggcttccttttattccttttggaatccacttttctgtaccactccctgagccaagttctccactccacaaaatgaacttctccctcatgtgtagggcatggctcagactttcaaacggtgtagtccctgccagtggagaggacccctggaggtatctcagaagaagcgtgagtctccgaaggagcctcagatgccatagcttggcgtaagcagccttctcatggatgggagctctttgtctactgactgtgaactccagggtggaaaagatacagattcccaggcctgtcagtgttgctcctgagaaaagctgcatctttacaacgagcttttcattgacaccaggagagggagagctgttactgtgaccaagagagtggagaagaaatgccagtcaaaatgaagctctcatgaggaccccaggaagccctctctgtagcccgggcttctgcttctggccaaagtgcagtaacagggaccagttttgccctcctacctgaaacaataaaaaaacacacagaatatctacagcaatcatcttcgaggccctgaacatcaggtgatgagacagaggtccgcgagagctggaaaacaaagtaaacccacagttgtgacaactcattgccttaagagtttacacaggggaaggggaaacaggtgggaactgaaagactctctgagttgaagagatgaagttgagagtctgggggagatcaaagcagctggagtttccagaatggagtgctagagaggagagagttagctacacagagagagagcttcagagatctacaaagaactcctcccaagtactcagttgagtacagatcagaccatgcacgtaagggaactacccaaggcaggggagagggttagtagtagcagcacacagggccaagaagagtgcttgctcctagccaccacgcaggaaagccgtgtaatgcaccggatattgggtagagtacaccgaaagattttcagtaaggagggattagtcctaagttctgcctaacacatttcagaggcaaaacccaaatggatgaaattattttcttgtaattcaaatgtatcccaggacaaaggtcaataatacttatagaaaaatagaaatatcttgtgcacaacaagatacaattccccatgcctggcatttagtttaaaaagtatcaggcatgtaaagaagcaaggactgggtgtggtgtctcacacttataattccagcattttgagaggctgaggtgggaggactgcttgaggccaggagtgtgagaccaacctgggcaacatagcaagaacccatctctacaacaataataataataaaaagctgtgtgtgtcatggcacatgcctgtagcctcagctacttgggaggctgaagcaggaaggtaacttgaacacaggagtttgaggctgttgtgagccatgatcacactattgcactccagtcagaatgacaaagcaagaacttatctctaaaataaaataaatacataaataaaaataaagaagcagtaaaatatgattcatattgaaaaaatcagtcaattaaaaaaagcaagaattgacacaaattatgtatagatattagaattagtaaccaaggatactaaaacagttattataactgtattccatacgttcaaatagttaagcagagacatgaaaaatgagcaaacaatcatctaagccatacttccagaaataaaaagctacaatgtgtgagataaagaaaatactagataagaataatgacagattagacaatgaagaagaaaatactgaactcaaatacacaacaataaaaactactgaaaatgaagcatagaagaaaatatatgataaaagaaaatgtgtggaacattaatgatctgtgagataacttcaagaggccaaatatacatgtaaattgagttgctataggaaaggagaaaggaacataaaaaatgtttttagaaatattggccaaacatttttttcatttacattagcaccaaaatattgaaatacttagatataaatctaacataatatgcacaagatctatttgagaaaaactacaaattctgataaaagaaatcaaagacctaaataaattgatatttcgtgttcatagatagaaagacaatattattaaaacattactatgatgacttaagactctaaattctttaatggaaacacaaagacccccaaataaccaatacaatattaaagaagaacaaagtaagagaactggtactatccaaattcaagacatacaaagctacagtgatccagacagtgtgttattagcgaaggaacagacaaacggatcaatgtaacagcacagggggcttggaaatagatccacacaaacatagtcaactaaattttgacaaaggagctaaagaaatttaattaagaacagataggcttttcaacaaatagtgctggaataattcaatatccacatgcaaaaaaaaaatgaatctagacatagaccactgtaggctgaatattaatgtcactccctcactgcctctgccaaaatatctatgttgaaacctaattcccagtgtgatgatatttggaggtgggaatttggggtggggaataggtcatgagagcaaaggcctcatgaacgggattagtgtccttacacaagggaccctagagagggcttttgtacctcccaccatgcaaggacagagcaaaagatggctgtctgtgaaccaggaagcaggctttcagcagacactaaatgtgtgttttgatcttggacttcccatactccagaactgtaggaaataaatgtctatttcctacagttgtttataatctacccagactatagtatgtttttacagcagccaaaatgatgtaagtcacagaccttacgtctttccccaaaattaaatcaaaatggaccataaatttaaatgtaaaaagcaaaacagcacaacttctagagtataacataggagaaaattattttaaaaagttcaacatcatatgtcatcagagaatgacaagttaaaacaactatgatctcccactacagaccattaaaatttactacaattaaaaatagtgacaaccccaaatgttgacaaggatgtgaagcaacaggaactctcaatcattgctggtggaaatgtaaaatgatgcagacaattttgaagacagtgtgcagtttcttacaaagttaaacataggcttactctatgatatagcaataacacccttaggtatttacctaaatgagttaaatacttatgtccacataaaaacctgcccatgaatgtttgcatatatttaagacctaaaatttcaagtgctgtcttaacatgtttgaacctcacagagcccagatgtctaattgtatgttctttttgtctttatatggacaactggtttttgacaaatgtgttaaagcaattcagtggagaaaaaatagtcctttaaacaaatggtgctggaaaaattgcatatccatatgcaaaataatggacttcaatccatattttataccatatacaaaaattaacttaaaatggattatggacctatatgtaaaatataacgctgtaaaacttttagaaactttcataaaacaacaaagtgacagttggacttcatcaaaattaaaaatttttttgaaagacattgtatagaaaactaaaagacaaataccactgaaagtgttttcaaatcatacagctaataaagaacttgtagacagaatacacagaaactctcataatttaacgctaagaaataccagcccaattaaaacattggcagatgatttgaaaaacacttcaccaaagaagatacaccactggataataagcccatgaacagatgcctgacatcgtgagttatcagggaaatgcaaattaagactgcaatgacaagccactacaacactattcaaacagctacaattaaaaagactgattatacctggtgctggtgaggatatggaggactctgtcctctcatacactgctggtcagaatgtaaaatgatacaactactttggaaaatagtgtgacagtttcttgaagagtgaagcacacctattatatgagccagccattcctcttttaggcatgtacccaagataaatgaaggtatacgctaatattcatatcaactttatgatagctgcaaattggtagcatcccaaatgttgaccaacagctgaatggccaaccaaactgtggtgcaccgatacaatggaatactaatcagcaatgaaaagaaaggacatattgatacacacatttggctgaatctcaaaatacttacgttgagtgaaaaggagccagaaaaaacaagagtacattctctataattctatttacacaaaaaatagaaaatgcaactcatccactgtgatagaagcgatcagtattttcctgggatcacaaagggaagcaaaaaaaaaaaaaaacttgggggacaaagtccacaaagatactcagggcccaaagatatggagatgggtggtcggtagactggccagtggcgttagggctggcatgaagtcctgaacttttcaggaagctctgtgagggcttagaaccaacgtcagagaaaccagaaagcttatttcaggttgtttggtgtctaataactcagaaattaaaattctgcctgcaaagtaggtcccacacagcctgaaaattctctgctttgttaggactcagaaggcatggcctccaaatgttgcctaatgataatcagggctgaagtggaatcagatgcaacagttcctgagatctgacatcatccttaggtggcctcaggcccctgggtggcagggcggctggagtctggttcggaagcagtgtcctgattgtgcaatcagagataattggtttctaactctgatcccatttattcttcccatctccagccaggaaaagctgccttggctcctttgtttttagcctccacattttcttactgtcagctgctaaacattttcgtttcttccatcttctggcatcttctcttgcctacctcatgcagcccttccctcaccttcgggctgctcatcatttactctcctctccttgccccctgggcaacacaggcagcccgttctccccatcccctttccagaagaacccctgatcaccctcggaaaacgtgtcccttatgccatcccccaggaagtgtagtagctcccctctctttcccttgagcagcaactacagaatccaccctccctttgattaataacatcccctgctgccatgctgtttctttaaaaaccaaccatccctgtgtctcttacaccagactgccagcttcctggggtttgccttgccagcccctttcccatccacgagttgcctgtgctcagtgaaaatgtcactaggctttttgcataagcccaagtaaagcagaactcattcattcgggggggaaaaagcctaggttgcaatgactttacacatcaataagacatatgtataaagctgttcaagttgttaatgattcaacatgaaacatccaatatcacacgggacaaagcaccttactaaccattaatgaatacgcatacacagaatatgagatcgctcctgaactcctttcagctgcctttgataatacaggctcctgtatcatccctgccacataatgaaaacctcagcctgaattgtatcaatgcaaatcacaggagctgcctgcaagcttgtgtattataacttacctgtggggccaataaaaagatatcccattatcagccttgtccacttaactattaataagacattcccaggccttccatcccatgcccctttcctgctcacatgaccagcaccacaaaacctgcttcacttccccacttgcagacttaactagggaaaggtgctccgagtgatttgagcatctacaaaatgaaatccacatagaataatagaagggagttcttcagtggtgcaaggtctttcctcccaaacactggaagtcccagggactgaggcacctctgtcctgagccacagtccttccatttcttcggaaaggccttcctcagagtcttaggtgggtgagtgagctgcatatggcccctgtgctcttgtttccagggcagtggaggcaggagagaaaggggaactgggcagtcaccccttgggggatgactcttggccctctcttcctgctgcgtcgcctcggccatgggctctcctcctgaaatatcctcgacttgctccaggtcttgtccgctgtcttccttgctccaagggaactcttgcgtgaaccctgcaaaggagcccagcccacatcaagcgagatgagccaccatcctgctacgaccaccaggtggtgctgttctccctgcacccaaagtcattcatgccaggagggcgcagagagctccctgcaccccagctacaaggcagcaggaaacaccagtaaggttccttggctcagagctgttgtgcataattacagccactttcttttacttgtattttctggagtattttttccattcccagactctcctcctcttcatttcctggatattgttctagtgcacattttacacacactgattccctttctttcttgaaaacagcctcatattcattttagaatcaagagcactgaattgtacaatcactaaaaggaaatttctggaaaaactgctctgaaaggcatttttctccctggttagcatatcttgctttggctggcactccagtttggttaattaacaacgcatgggcctctcatttgatggtatattatctcttgtgatcttcacaacaatattcataacaataaataacagctgaagcgttagtgatccctgcctgttactgaggaatttaagacggcacactagccttatgattagcatgtgattggctagttaactgttgaggttctaccagaatcacaccctttgactcctgtttctgtcctgtttctccttcaacagctttgcctctttcctgtgcaagaggtgggtgtgttgattcctattctttgccctccataggtttttttttttttttttttaactgttgggacagactgggttttgtttttgagataggagggtttcctctcttaggaaatgctctgctaaacctgtccctacccagttgaattttctgtgtgggcgaccaacaatctcccatagatatttatagtacttttaaaagtccttttcattgtaatattctgtgtaatctccataacaatttagagtagggcagaagactcccaaaatacagatgcgaagactgaggctctatggagttaacattcccactagaatgcgttggagtgtctatgtgcaggatcctcaaagtagcgtcctttttccactctgctacctctctctacctcagttgtctccgcaaatagcggaaccaaaagtaggcttctttattttatttaggaaaggacatgaaggataagttatcttggaaccacaagagaaacaagaggtaagcagaatgtaattacccaagttggaaagttgccatatgtaacagcggcagaactccactgtgggacaaaaaagcaatattgaccaagaaataccatattacccttcacagactcattctgatagttcgttcttcacccatatttattcaaaagacctaagaatctagctatttactatgagaaactcattactggcatttgcagatgctcagggatgtagtgtttgagactgagagtaggagacacctaagaaaaattaataatgcatacagtaaaacccatttaggtttctatttgtgaagaagggctcttatgagtcaagatagaggagtaagagtttggaatgatatgcatgaagagaaatacagcaatggaagagtgggaataaagcttttgactgtggtgtctatgcctctgctgccaaactcaaacccaccctcaaacaaagcagaaggagcttttagtgcagagccccaacttttttccccactttctagaagatggagtttgcaagcactgcagagacagactgggatcaaggctccagaaagcagcttccagatcaatactgaagcctttgtagcacaccaggagcagaaagtgtcttggaagcatctaacactaaaaatagagctgcttcctaatgggctgggttggcttacaagaggcagaggtgggaggaagggcattccaggaagaggcgctcctggaatcaggcattcaggctggaaagactgagagaatagggaaaaggagaaagggtggggaatagagagagggaaagagagagagaatacgggagtgagcaggtggagcaagaaatgctacattggaagtaagattggaaatttaggatgtggctcgatttcgaagaacctaaaatgttgggctttgttagttaaggaaataccactgcagtttctatgtgcacgtgtgtgtgtgtgtgtgtgtgtgtgtgtgtgtgtgtgtgtgtgtgtgttggggaaggggttttaatgtgtttcatgggggtattttagggaatattatttttctatagaaaggaatggtcatcagaagtctaccttaaaaaataaattattttgaaaaaatggttatgacggatgccctcaaaagaatttgcatatttgcaggaagaaaaaggccaaaaggaccattaacgtgaaggatggttttctcatcgctggtttagctcctatttaacaacaggaagctctgggtacttgtggaaaggttctgggaagtggggggcatttttacagagcatttggctgagcctctcttgaaaaactcttctaagtgtgtgtttttattaatgatttcaagtgaacaactattctgccttactcctgcattcactcttttggaaggctggtgaatgatctttggagatttgtgtgtaaatcctgttcttatatttgcttatttatattttaactctacttaaaatggagatttttacttttctgcggttttacttaggcacagagagaaacaatgtggatacaacacttttcttctaaagatgttgatattacttgccatgtgtctgtttgcttgttttaaatagaggactgactcatagcacagaaggaatgtcaaggagttccagatatctctcatgcattaggtacttcagtaagagtcaatatcatgctggccatattgcttctgatatctttaggatccataaaattgagtttggtgtatcatcatgttattctgctcctataaacccactttgaatatcaaggtcgcctgagacaggccaaggtcctgatcaagagggaggctcaattcaagttaacattttatgtccttcctgggaaaaagaacctaaaggttgtcattgtttcatattcctcccctttccatttagggagaagtttcacactttagcagcaaattgcacttcctagcaacatcaggagctcttaagcatgtcaggaaaaatcgacatccagtgaaagtgtgaacagtctagagaggtttgcaaacagcaaattacatgcaccaagaagctaaaatacaggttcctttttcaagagttcttttaggaaggtagctgctatggtttgaatgtgctttacccccatcaacactcaggttaaaatttgattcccaatgtggcagtgttggaaagtggggcccggtgggaggtgtttgggtcctgggggtggattcctcatgaatagattaatgctttcttgaaagcgagttctcactctcatgggactgaattagttccagaaagagtgggtggttcctccccatgtttggtctctttgcacacacccactcactactctgcttctctgccatgtcttgacgcagtgtatgaccttcaccagaagccaaacagatgccagtgccatattcttggactttccagccgccagaattgtgggctaaacgtcttttgcttttaaatttcccagcctcagctaatctgttacagcaacactaaacggattaagacaaggggtacctctgttcaatcaaggtaaccatatggggaaaggagcatacgtagaaacctattgccctcctcctccatatatagatctcctctatggtggctagacagccagtatctacctctgatttggagcaaatttcctaacctctcaaaatcaagtttcttcacctgaaaataggacaatctgcttaatttcctgtttgtaaatccatggtaatgaacatgccttccatagccattcccattatcctcttggactaccaaatcccatttatgcctaaaaggaaggccctcctcccacagatgaagggaacatctcccaccccactcctggtagatgctgtagattttactggttccaaagctgcgtcttagagcgaaccctctctaagaccctcagatggtctcactcaggtcttctccaagagtaggcattcatagagatgcctacataatgaacctgcctttactgagctcctaagcattgcccggaatgcttgaatgatcagcaagtctattctccattcataaacctagaaagagggtctttcattgacatgaacctcctacccagctgaatgaacagacttagaatactaaaatactaagtacaagttaagtttcccaaattagaacagagtgtatttcaaagtatttgttgactatatggagcttagcatacatttttccagatatgccataaatgattgtcagggtgcctccacgagcccacaaaagtaatctaacacgtaatgtgactgaaatgcacttattatggtgctgctacactaataattaagcaaaatgtgagaacaattgaactatataaatcagcctcccttctatgagttcactgagggtagaaactacattaaatacctctttgcacagcaaaacaataatcgttgctagcacttttacagggcttactgtgcaccagaaaccattctaagtgtttacatatcttaattaatgtaatcctcacattaaccttcctgtaagctctattactatccccactttacaggtgaaaaaaccgagactcagagaggttgcccagtgctaaatagttaataagtggtgaaactggaatttgaatccaatctgcctgccttcagatcatctgctgttccagagaaagcactaaggatacatttattgaatatttagatctaaataaattgctttgtttttattggggttctgacacttagaaatgggaaggagtaattagaagaaatgaggcagattggactgatattctttagtgggagtggctgatgatttaggagctatgggaacagggaatatcacctttgttgggccatgtctaattttacatatgaatgcggggcttgagtttttctccagtaggcatatgactccagcacttcccattcggatcagtcatgattagacttttatattttcccctcacaaatggaaataaaagagaacaaatgtaattttcctgaggtgactagggagtcttaacgagaagaggaaaagcaggaaaaaatagagttgaggccaggcgcggtggctcactcctgtaatcctagcactttgggaggccaagatgggcgaatcacctgaggtcaggagttcgagaccagcctggtctatatggtgaaaccccatctcaactaaaaatacaaaaatttgctaggcgtagtggcgcacacctgtagtcccagctactggggaggctgaagcaggagaatcacttgaacccgggaggcagaggttgcagtgagccgagatcgcaccactgcactacagcctgggcgacagagtgagactccgtctcaataataataataataataataataataataataatactgataggctggacgcggtggcttacgcctgtaatcccagcactttgggaggctgaggcgggcagatcacctgaggtcaggagttcaagaccagcctagccaatgtggtgaaatgccatctctactaaaaaaaatacaaaaattagcagggtgtggcagcgggcacctgtaatcccagctacttgggaggctgaggcagaagaatcgcttgaatctgggaggcagaggttgcagtgagccgagattgcaccactgcactccagcctgggtgacaagagactctgtctcaaaataataataataataataagaagaagaagaagaagaagaagaagaagaagaagaagaagaagaaagaagaaaaaagaaagaagaaagaagaaagagaagaagaggaagaggaagaggaggaagaggaggaagaggaagaggaagaaaagaagaaaagaagaaagaagaaagatggaagacggaagaagaagacggaagacgaagacggaagacgacgacgacgacgacgacgaggaagaagaagacgacgaagaagaagaagaagaagacgacgaagaagaagaagaagaagacgacgacgaagaagaagacgacgacgaagaagacgacgacgacgacgaagaagacgacgacgacgaagaagacgacgacgacgacgaagacgacgacgacgaagaagaagaagacgacgacgacgaagaagaagaagacgacgaagaagaagaagaagaagaagaagaagaagaagaagaagaagaagaagacgacgacgacgacgacgacgacgacgacgacgacgacgacgacgacgacgaagaagaagaagaagaagaagaagaagaagaagaagaagaagaaggagaagaagaagcagctgaatgccaaagtgtgtggacttgagattgcctcctggagtgaaatgaccactgctgcagcaggtgaaggagaggaacaaggcagcatggtgcaggcacgtggtctccattccaagccgggctctcgcatgaggcctcacccatttctccactgacatccttactcttgtttccagatccagccctcctggagttcacacattgttttttctctctctttggcttgctctccctctccctttggtttgtatcaactgtgcatacagaactggtttcaacaagtcttcaaattttgctccacaaaatagtcttcatcttttttgggttcctcaagtcctctcctgaccagggcagccctagccttttcccactcttctcaacccttatctctatctgtcttcagcctgtctctctctctccttcattacctacagatgacggcagttcataactgtcgctttcacacagatgcttcccatatctttattgaatctcacctttctcctgcctcctgggaccttcacctggctgctcccagcaagaatccctgctttctctccagggacagcataagttattgcactgagctgtcaacatagcttcaaccagcatatctgaagctaaaattacctttcccttcccactcaaatgtttccccctaatttccttaacaatactatttaaccatccaggataataatgaggattaatatttccaccttcactatcccctaatttcaatctatcaacaaatctgatccattcttccttctcacgctctgtctcatccatctttcctttcattctcattacctccaccctgactttcaagctgtcctcattactatgccaagttccttggcttttagggcatgagtttgctgggttagagcccaagctctgacttttaagagctctattaaataataatagcacatacatcacagagtagttgatatgattagttggttgtgtgttaattctcaataagtagtacttattaatattatttactttcctctattctcacctctatttcaatccaccatgtcttctaccagcagaacactttttaaaatgtattgttctgacaatatgcttcactgatccaaaaccaaaaaagggtcgcaactcattaataaataaattcaaaagtctgtagcttggcactcaatgttcttctcaacatgttccccagtggcctgactgtctttatcccactctggtcagaatgattgttctattgctcccaagacctatgtccatgtcactcttgctgtttgaaagtcttcccagcttcacactggagcctaaactctgctcaagacattgcactgatatccctggttataatttctttaacttcccctgatctattttgcacttttatcagaattgcttactcaatacaaactacaaatactaactactgtctattattttaatccctagactatcaggccaatgaggactgggctttcattttactcacatgggtagtcctggcagtacatagcacacagtaggttctcatgctttttgctgaataaaagtgcatgagctgcctatttccactgacacactgaatggttgataaataagaggtgtgaaggaacgtgcaaaagagaaagtagggtgagcatggcatagagatggctgttgtatgatgggaattctgatgacttcaggccaaagtccaaacgctttttccccaagtgcaaggactatgagaaggcacttggaggtctctgcccatacaacacagtctgggcaaagaactccaagtgccttctcatattcctgtgccatgcatctttcaatgtgattgtaattgtgcaacccaggcatgggccatgctgctggctcttgtccttagatgtggttggatacctgcagtccaacctctccagagaccacgttcctcacaaacagccccagtgtgtactgaatatctactccatgtgaggggccttagcagatgagtcagactccagagtgtagctggatgttggatggatgtgaggaggaagcagtctggcctcctctgtttccaagatagaatgtcagtgacatatgagcaatagcctacagcgactgaagagagactggttagatctcactaggtctgtctctccttctaaggcacacagaaactaccttcacaactcccttccattttggtggaacactatcattagctttgctgagtggaatgagagtgagagtaacgtggccatcccagggtgaggccatgtcctctcctctcccattctctatggggtggaatgaccaacatgacctagaaacatcaggtctgcaggtgacagatccacagcatgaaagaagtctgggtcccagaatgcatgcatggagcagactccttgcagacccacatagtattgtgacatgtgagaaaggaacaacaatttttgattaagcactaaaatctgtgggttgcttacgagaacacttaggatcttttagaataactaatgcactgttcaaagcccttccccatatctcatctcagctggacctcagagcaaactgagataaaggaggcatgaatcggatgatgccattttccttgtcgggtaaatgaggaaagggatgtttattggcctgccttaacctctcaactagaagccaggactgctgagaaagtgcctacttatctttctaggttaataaataccattgttattttcttccacggaaatacacattcaattgctgtgatactagctgcaatcggcttataaaccacattgctctttctaagaggcaggaagaggtaagagagatggaaggtggagggctcttgagatgctactctgtggagatggaggagggctcatatggcccttgagctcatgctgttttgtctggttcttgtttcatgtctggatgtgaagaggtgccacttagggtctgcctgcctccttgtgtctcatcttcttctctcctctgagagaggacgttgaagggagcttcaagaagggcatgtgaaggagggacaactccctttttctttcacgacgaatgcttcagtcactagaaaaacagggaaaaaacagcagcccatctctgcttcactgcgctctcttcccagggctggttcccagggattccgtgaggattcagccccatgcgaccatggcactccctgccacctgcctgcacaggccctgagcagagcctggctccagcccaaagggagacacacatccatgccattaagcaaccccttgccccttttgtttagagggttgccttttgaccctcttcagcaataatgttttatttcttcaggcagctggcgtatccatttcaaattcctccccatccagaagtgatggcaaggagggatggactcgatttgtgagttgtgagaacctatcaagagtgtctttcctacaagcccagggaagccttcagctgtgctttcggcacatgggaagcatctagcacgctggccagcacacagtcaaagcttcgtaagcatttgtcgagtgcataagtgattagatgagtttgattatggtctgacttcctatacttgtatatccatccttatctttatgtgtttatatccagtcttatctcaaatgaattgaaacaagtgatcaagtgtctatattctaacaaaagaagctattttttacatgtgttttggtaacaggtagctaagagatatttccatcatgttctagtaaaacagcagaagctatagatccaaattcaagcaatgaatcaaaaacaatacacagacatctgggtgacagacaaagtgaaattagcacagccgagcagcgaattaattcaagtttctggaaagcagaaagcagctactttgtgggcatctaggcaagaggtaacctgggctcttagcaacaacagtggccagatgggagctgagtcttcaggtggcatgtgggaatcagcagaaaacggcagcgagtgagaccaggtgagaattcatttaaacaaatatgctttggacttatcatgtatgcttacctgattctttgggggataaagagataaagttgtctactattaattaatctagggctgactacgattaatgacagtgctataactgaggcagggtgctgtggaaatgttctagaaagacatattttatcaaggtggaggagagtggccatatcacaggacatttacgaggagatgaaatttactgaagctttgcaagttagatgcaatgttgactggcaattatagaaaagggagaaggtagaaaaggcaattgtagcaagacagaacctcttaaaggtaaaccagagaaaggtaattattaaattggtcagcaagcaaattaggcatggggataggagtagcagttgagaaaaagttgtgctggaaggaaacctggaaagtttgataaggtcacagtgttgagaacttcaaatgtgaggcttaaatacttgtgctttcttctgaatgcaatgaagagccacccacagcttgtgaacacaggagaggcaggacaaaaagaaagaagcaaggtaacccttacggcagtacataaggcacattggataagaaagagcgtggaggtaggaagactgatttgaaggtggggacatggccatgaggccctgagctggtgctgtgccctcagctgtgtgccggaggggtcagcactggaaggtataaccaatgggcaggctgtggttgctgagtgaattcgcagacaacagagaggaaggagcaaacaaaagatctggaagttggaaccatgatgacaggaagtggagagtgtcatttaaaaagtaaagggaggagagagaatgaatttacactggcgaataccttacaaggtattaatgatgttcatagacatttctaacaatggtagccctgtgataatgtcttattatttccatttttaaatgctagcatagatccatgattgaagcgagggactagagttctaagagctgagatttttactctaggcttactgtgcctgtactgtgtgctgccagataaatcactcagcctttgtgggactgtggctgcgtaaaagagaaatggggctactaatcccactaatggtcttcttgataaggacacagggatgatgagtgagctgatgcttggagctctgggagggagaggtcatgatcaatgagagtgtggagatgttccctgccatgctctatcttccatcttttctttttttttttttttttttgagacagagtttctctcttgtcgcccaggctggagtgcaatggcacaatcttggctcactgcaacctctgcctcccgggttcaagagattctcctgcctcagcctctcgagtagctgggattacaggcacccgccaccatgcccagctaatttttgtacttttagtagaggcggagtttcactatgttggcagggctgatcttgaactcctgaccttgtgacttgcccgcctcggcctcccaaagtgctgggattacaggcatgagccaacgtgcctggccatgctaggctaatttttctctatttttagtagagatgaggtttcaccatgttggccaggctgggtcttgaactcctgacctcaggtgatctgcctgcctcagcctcccaaagtgctgggattacaggcatgaaccaccacgccgggacctctatctcctatcctcatctgtctcttgcataagtagggaactccccccagcacaggcccagtaacatgacagggctagagcccatgttcactgtggacaaggggaaaaaacacacacagttgagattacacttctaaaaagagctgtccaatttatcagctattcccctcctgacctttgctgagtactgagaagccgtggtgccttcccctgcaagcttcccctctgcaggagactccaatgaatgaagcatgcttaaataaatgtctccaaggcagccccatcaaatattaaaagaacagaactccttcagtcagcaacagggcacggcacccaatccctgagtgtcaggggctgccgcctcctctgatcacttcaactttaaatagctcttcaggggggtgttcctatcactaaggctgataggcagtgccactttctacacgcaggctttgtctgcagcatctctcaccaacacagaggaacaagaaaacctgctgaccactcagaaggggagaggcaggtaaaagaagacgagggaggcagtaggtcatgggagatttgaggagttatcacttttgatagtctggaggccaaagttgagaaaggagaaagctaggcccagcgtgcagatctggcatctgggaggtgcatcttgagcagacaggacacggagaaagccctacccgcttcaaaacaggaagactctaccctctgagcgagaaaaaggccaatttcgatggtaagcagcagtgactttgaccttagcaagcatgtgtgggtttataaaatggggataagaatgcttacctgggatcgatgttttgggaattaaaccaggtaatacacagaagggatgggtggctctgcctgatacttcacaggggctcaacaaaagccgatgtaacccgccctgctccccatctcaccacatccccctttaaatcagtccctactgagtgccaggcaccagagcagacaggtcctggttgtacaaactgcaaatgatagaatccctgtccttgaggaattcaccggttcacactgttactcatcacttgtgcatactcagctagttcataacctctgttacttcatctgcaaagacggaatgatgatggcatttaactcaaaattgccccgtttactgcccgtcctgcagttgttactcagcgaacgctttcttcctcctgcccatctctcatccctccccaccccagctgccatctgatgttgggaagccatggtgataaaggtgagaatgtcaccctggggccaccaggcagccacacagccagcttttccactgtctgcccccaaatagctgcctttcaggagaaaattaagtggatttctcaaaatgctaaactcctatagaatccagaggtctcatttccctcctcccttcagaagatccactgagagctcccatttcctctactgctcctcacgaggtagcctctctcctgtggcccaggtactgtgaggtgaggcttgcccactgccttactctaacactgaccaagcttgctccctcatgccattgatcagataatttgtactgagagctcacagccagagacgataaacttggagggaacgtgcaatccatgcagactcccctgtcgcctccagatatctgcttcttactgcgttggtaaatggaaatgatggctccaacctctctgaaacaagagggagggaagtatcgctggctgttggttttcacagccctgggcactggtttggaatctctgtccactttgcaggagactggccttcgggtagacagaagagaggagtggtgaagaactgaaacagccatgtgcacttcattgctcgctccatcccaccgccctgcagggggcgaagaactgaaacatccatgcgcacttcagcgctcgctccatcccaccgccctccaggggaggaggggaagtggttctggtgtcccagctctacaaatggcagagacgaggtccagagtttcagtgagctgtccaggatcagagagacccaactcagattctgactctgagcacagcatgttttccaccctggcactcaggaagctgccttagatgacagctgaaaaagggaaggaaggaaggcttagagtgatggactgggcaggcagcatccaccatacttcaggatttagggtcctgattaaccaagcaggctgatgcattcagtcttgagaaggagagaggggttaaggtagaggaggagagtggagaaaaagttccctcacccactgccagccgttcttcccctccttccttgaacaccacacttcacctgctctctgaactgggaaaagcaacagacccagacagccacctcaattctacttagcagcttaaaaatctaaattgatggctgtcctcttcatctctgaaggtctgttatttaggttttgtggtttgttcgtcctaactttgttacgcaccatgatacttgcaaatggggcaacataaattaagaactggtaacggacgacatttggagcaggtcctacgggagattcagatgaatcctgatttgtggatatgaggaaatcttccaatttgacattgtagtatatcacccatatatttccccctgcaaatgttctttcctactgtttttagcctgcctctttaagccagtaaaaggagaggccccaggcaactgctaggcttcccacttaaagtaaaacgaagttaatttacttgcaaagaagacatacaatttacatctcctcttttccatcccttctaccatttagtgtgtccctgataagtcggttgccacctccaaattctctcaacccccacccgcacgcttgatgttgccagagacagaagaaatatcagtttttgacttgataatcggctgtggaaactttgtccaattagttattagagcatgtgcagttgaggatggtgctgctggctcactgaagctgctgctgttttgtcatgtggtgtctggctgaccgttaggccaccctgggcacatcccatcagctcagtaatccttcattctcaacagcagacatccaatttggatccaaagcctgaccattcacaggaggatcgtctggggagataaaagtagagcctgctttgggagcagggaggtggttatgccagagttgagtcactatcactcttcaagaggccggagcacttgtactcagcactggggaggggaagcgtctggtgcttgtgttctcccagaactccgtccctgcctacagagggctccagccagcatcccttgattaacactgcccacctccactcactcctttctctctgggccaggcccaggccacagcagttttcttttgttatctcatttaaaccttaaatagtggtcttgggaaacatgttttctgtgtctttattctccacaaatgaggaatcacagcctccagatatatcaggtgcccatttagggcatgctagtaataatcacaaagtctaatgtgtatcgagcccttactccatgtcagggactgcgctaaaccctttgcatggatggtctcaccctttcctccaacagccctgagggcttctgtcatcgtcttcattttgcagatgaagaatctgaggttccagaggttatgaaatttgcctgagttgatgcaggtgcgaaatggtgcagctggggtttcaacccaggactctgaaccctctgttttcagttgccacctctgtaaaaattagagctgcaggaatttgagcccatggctgttgttttcggaatccatgcaccgtatgctgccttacagtgtcctctaaaacctgaagccacttgatgccttggccccttactgtcctgatagcttcctgactgtgggatgcaggctgcctcatggcactataagaccccactccaccccagcacccactgtgcagtgtcggcaaaggtgccctggcatcttacaaaatcttcctcctctctcttttctttccccaggaaagaaacctgcaggaatctctctaatggaccttgtagacctggtcataaaaatgagtgtgccttccagctccgacactgcagaagtggtcagcttgtgtgggatggccacagggctgagcaaatgggtgcatgtgcagacccaaagggcagctgagaaggactgagagctcctcaggaagccacatcctcccctgccccggaacccttctagaaagagagtggcctccaaagctatttcagagacattaataattcgtcggccaggtgcggtggctcatgcctgtaatcccagcactttgggaggctgaggtgagcggatcacaaggtcaggagttcgagaccagcctgaccaacgtggtgaaacccggtctctgctaaaaatacaaaaattagctgggcgtggtggtgcacgcctgttatcccagctactcaggaggctgaggcaggagaatcacttgaacccgggaggcggaagttgcagtgagctgagattatgccactgcactccagcctgggcaacagagcgagactctgtctcaataataataataataataattcatgaaccccaggggaaaaagaaaaaaactttaaaagaggaaaacaaggatctaatgggcctcagaggctcccacacaattggcaatggctggtttgccctttggctgctggagatgcaggaagatgggggaggaaggaaggaggaaaaagagaatgtatttttttttcaaaaaagaagcacacttttaaaagctagaagagcctgtatcaatatgaccttgtccagaatttataaaagagctttggtatataaatttgatccctgaaaattattggatgaggaaagtgcagttatgattaatctaatttttcagttaaggagaaatacatcttcactagtttggggtttgctggcagcccaagccctgaccctccacagctctgtcccagaggctattcttcaccctgtggacactgctcctggttcccacctgtgttctatcacgggatcagttagggcttctcgagagaagagcaggagatggaggtgggaatcttggtctagagttctctagatttcagcaaaaatctcaactgagatccccaaggctgaaaaaagaccccaggccctcagaaaccattatccttccattcaagacacctgggactcctcagagtgccttggcaggatcccccaggaagagaatgcttctagctcttgaccttccagagggttttggtgatttttgtatgaagaacaatgacatcttttttgttcacagttgttgaggaacagaaacagagatttagtttataatctgatgactagttgtcccttttatcccccatgtattgtttctaccttggagttcaggtgtcagaaactgtctgatcttatttttaacctccttcagaatccaaaccgctgaacaaaaaaagaggaatgatttaaaaagagggtcagataccccttccaatctccttccttacctccccactcccactctgattcccctaccactcagctccccgaagaaagcggaaaagagtgtttgccttctattttgtgatgcttatcaacagtaggcaaaactccattgttatctggagctgtgtggcattgtttcatgtgagtgcccacttcgttatttaagaactcggagtttcctttaaaggttgcttcatcaaaacatgccattagttagagacttctgcatccacatcgaccgggaagaatgtctaattgccggcctctttcatacctcttgcaatgcccaccctccctaatcctctccactcccaccttggacccaaggtaaccccttccctcctgatccccccccaacctccacagactggtctgttttgactcttttcctggtgcagagacatttcttcagtaatctgggagtgttcacgtgctaatgcaggtaaattgtaattaatttctctctaattgatgcgtgggactacctaggcccctcattttcctcccttcattcctttataaatatatgatttgacaggttaatttgaaagcaaaagttagattctttacagccatctaagccgaagccccagcacgcaatttgctgtctagttgtgtgaagcataataaaagggttgaagtcaggttatcctttttttttttttatcatcattttgctaatttaatctttttccccttcataaggtaataaaatattcatttcacagcctgaaagccttggcagcgattggcgagggagcagtctccacagcgggctgtgtgttccacggggtgaccttctccctggggtccctgcagcctggaccctggaaggggcaccgcgagggtcttgtgggcggctctggaggagtttcgctttggcatctggatcaggactgagtcaagcctcccacattctgcagcagctcagagaaaagcgctagaaattactggagctgtgggagagacgggagcctgccccgcagccagatacccagaggcgttctcggaagatgggggaggtggaagtccgtttcctgtcagctccggcatgaaccacggggagggcttatggctggatgaaaccagcgcaggagtcacagagaggctgctccacaggagagcgagtcctccagaggacaaggcgagaacccagctgctcaaatggtaggctcaggcatcgctcagctatttgcgtccacacggaaggagcactgcagtggtccacgggaggacggctctcagagctcaggttgccttggaacccatcttagcttcttgctggtttgctacaaagctctctgcacccgggcctgctcactcgagagctggcctttctgacactagccaacctactggaaatatccaagactctaagtggctcagctcttcttccctgagagttggggtaacagcagaggggcttatgtctgatgggagcatctctggcctccacaccaggcacctttttccctgggcctccactttcccatctccttattctgtttaaaaccggagaaataagggaaggaggttgcttccctcttacaaggtgctatagaatagactgccccctgggaaacgtgcttctcagactaccccacagatgtgaagtatcacacgtgggggctccatctggatatagaagttggagttcccttgctgagatgcattcccaggtaagacagtgagacacgttgtcacagctgacacttgtttacttctcaccgagaacacggaagtgcccactttttggttggaggaccctgggtgagaagaagcaatccttaaaaggacgaaggcagatcagggcccagcattcaccagagtcaccctgcagagagggtgaataggagcagctcacacagagatctctgaccagaggacccacgctcatctgtagagggtccctaggggatgtgcggagcaggatggagccaggagggaggctcctgctgtcattcccatccgcacgaatgtgctcatgcttctgattaaaaaaaaaaaaaaaattgaggaagttgccatgagcaggctgacctgaccctggccccccgcaaaaagccacaaaatgagggttctgataaatcgtgaatgccttcaaatcacgaattccttctctaaatttaataaaagtgcatgttttagtggccatatccacccttacttttctcaggtcgttagaattttttatttttgtaacaggttctgcaattatgactattcttttacataaggttttgtcacattctttttgtccaaaaatttgggaagtttcattggggaaaaggtctcttcatcccattgttatttttaattatcagcattaaaaaataataataataaaaaagaatagaagtaaaaaaaaacagtatcttaacaagctgcctgaaaattacagaggaacaccacttattaggaaaacaattcaagcccattcgagggaaaatactatcaaaatatgtcatgagcagttgaggggacattgggaagtgagaaagagttcagactgagaggtggccaatagaaggagaaggaaaaaagaggagggaatgtgaagcctgagaaaggaagaatagcgaggaggatagtaaaatgctgagctttgcaaagatgagaatcaaagtttctgtgaacggaagacacggctctgcattgccttgaattgcaatttttcttatctcagagaactttgcaccagaaccgttgcttgtgtctttccagaagagtgatacaagatgggattagagtgcaacctgtttatcctattcctgggttagtgtagattgctgaggatttccacaggaggcacactctgagtatgtacttgaggggaaattcacctcttatgctactgggaaggtctcttaatgccagagcagagaactggaggaggaggaggaaatacttgctagtgaaaaccaacagtctgtgagaggagggactctttacttgcctccatccctgctttcattttactgtcttgaatgcatcaccttttctcctttgacagagaaatgttatgaaagagtggtctacatttggagttctcttttctcacctccctgtacccttcattccgtctatcatctgccttctgcttctactgtaatattgaatctgtcgagctctgaagagctctagtttgtaaatttcaaaagatcatttttcaccacccgtctccttcttagggatcattctgaccactctgtcctccaaacactttcctaccttggcttccgtgaaaccagctcctgcagtttctccacctttttggccatatccttcctttcatctttcctgggcttctacaattccttgcatgcaaaggcccccaagcctccttacttcacccgcatacccagcccacaccctcagattaactatgccgagcaggctactatatataatctatacatctatatgtctatatccatatctacatgcaggccagaactcttttctgaactcaaatttattcaactgcctacttgacatctccgcagatttaaatttacacctacatctcctctctgaatgcctgctcctggctcattcctcctcctccagtccccattttggacacagctttccatctacccactttccagaatcagaatcctggggaccatccctgctcacctcttcctctcaccacccatatccaaactattaaaagatcctgacctttgtacctactgagtatctctcaaatcaccctcttctctagtcctgtgtctttttgcaaggtcgggatcttatttcttatttaacccatcggagagcaagacactctgccaccagtattcatttctcaccagtccattgtctttgccgttaacgaatctttatgaaaggctaatcagatcttatcactcccctccttacacaatttttaaagtcatcctttgatcttgaggatgaaatcccaatttcttagcatggtaaacagagctcccatttttatacgatccttatctaatccccaccctcttacaacatgctatagaatgactgccccctgcttactcaacatgttacctggacccttcaccctgcctatcttatttcaagatcctagcagccacctggaggcacagatttctacggggtttttcttctctatctagccaactcttcctcagcctaggtgactcagttttaccgccactgtctgtggggagggcgagccccttcctgacccttctctatgttcccagaattcccagaacctacgccaagagaccagccagctgagcacatgcattccagtcatctctatttgctcctctcatcaggcctctaggctgagactttctggggagcaagagccatgtttctgcatcaccccttagtggagaatcctcctcataataggagctaatgaaaagttgttgagttgttcataaaataaaagtaatatgtaacaatttaccacaaggctacctataaagaattatgaagaaaatccaatgtttattgcaaaggatgtctattaaatggtgtcccttgggtaaatgtctatttggaatccccacaacagaaaatctacttctaactaaaattaaaaataacaccaagcaagcagaacaaaaagtagagtttcgttttgttgttgctgtaaatgaattgcctgaaaacctgagtaagacacctaagagtttctctcttgctggagctggactaagaacacctggaaaccctgcctctcaaaccccctcagcagcactcacagcagcctgttccctgctcaccccacacgtttcagctcatgaaaccacttaagaaatgcatccttacagccacggagatacgagatgctgggctccggctacatttgcacatttgcattctgcttatcaggtcacccaatggcaaaatcttcagagggagccggcaatttctccctcatactgaagctaatgagcaaaatagctcttgctgaaggacaagaaaaagtcggcgcgcacacggtgtactgcgggcaccacgggcaggctgtcatcattatgaaaaaccatcacaagaccttacaaattaaaagctgcggataaaacttttgccctatcgagtttgtaaggaagcatctcgctgttcatcaggtccaggcagctgcagtcggagctctcccagaatgctagcagggctgggctgcctcctgcaggctcccagaggggacacaacgtcagctgtcaatttctaagcaaagggagattgttttatacccattttgggctctctcttcatatccaggcttgactcacagagttgacttttattaccaggttaatcaccagcaagcttagctgaggagttatcagcaatgcccatccttccgctttttctcagctcccctctctgccaccccatctccttggttagcagcttcctgggcttctgctttgcatctttccaactagctcacggagggataaaggaagctcatttcagaaccagtcatcaactccccctttggatcaaactgcaagtgaaaattgtacccatctgtctaaacaactcaaggaaaatgggacctaaattgtccaattttggtgtgtccacctagcctgctaatttaattttactttccaaaaatctgagaccccatactacctcctcttctgcgttgatgcaagaaaatgagcaaagaaaaaatgcacatctccaaaaacatatcattctgcttgccccggggggcactggttatacaagaggctgcatctctgggatctgtattcaggtctctggtgagggccagcaggaagtgcagagccacagaaaattgaaaaataataggggaaaggagaaacaaacatttcagctttgtcttcaatgtgcatttggaacttggctctggaaaaagataagggtggagagatgcatttcccagcagtggcaggtgcttggctctatttggggctttaccgacaggggctggattgttggacttttgcgttctacgcactcagttctagaaggtgtggcaagtcccttcccgtaccgattcctgaaatgaagtcctcttccccatacccaaagatggtttgtgtttccgaacaaaatataatgagaggcttagttgagaaacccaaaacaaagcaataatctcatcaagtaaatgataattataaggaaggtgtcaagaatacaaatactatattcctatctcagattcatttctaaaaataagatccagggccaggcatggtggctcacgcctgtaataccagcactttgggaggctgaggcgggaggatcacgaggtcaagagatagagaccatcctggccaacatggtgaaaccccatctctactaaaaatacaaaaattagtcaggcatggtggcgggcgcctgtagtcccagctactcaggaggctgaggcaggagaatcacttgaacctgggaggtggaggttgcagtgagccaagatcacgccactgcactccagcctggtgacagagtgagactctgtctaaaaataaaattaaaaaaataaaataaaataaaataaaataaaataaaataaaataaaatgaaaattaaaaaaaatttctaggaggtatgaaagcccctcattagaaaggggaaggaaatcctgaagaacccctctcagggagggctgactgctttcctcctgtctggagggggccattcgtaccaccagcgagggcagaaatgtggtcaacagcctatctcccatagttgatttgaaccaggcaaaacagtgacaccgatgaattgcacactcaggtggcatgttcccttcatcacaggcttgttaataagatgagtgaaatcactctccagttcctgaaatgatttgggaagtctttcctgccttttcttctctcttctgcaaagcactcccaagctaatggaaagtgaaataaggtggtttgctgatcctgagtgagactgataagatgcggggtttttagaaatcttcacgacctaggcatctgaaaacatgttagcccattctctgcatcccgacaagcatttctgaatgggatgcttcattcccatgagggctctgccctgggttctggctcctgtggaaagggagaggtcagaggtccctggggcacgatgtatgcctcagtcaggacaggttcagttatgatccgacaacaagtggccctaaatgttagaggcagtggcaagaagctatgtgcttctcactcacaaggacacattcttctgtcccacagggtatttgctctgcaccaagactgacagaggggccactaaatggcagattgtcaatctcacattagagggaagacagggatgcagtgaataataaaatttctgcttggaattcacacagtcactactgcccaaatttcaatgactaaagcaagtcatgcggccaatcttgcattcaagagcgaagtaataaatctgtattgcgtagagaaggaaagtgaagattgacaaacattgtcgtagtctcctataatggaaggcagggctctgtcacccttggaatatggaatggctccaccattgtggaatgtctccctgtctcccaaagcccagctgcaaaataagcacaagaacgtgtgcccaccctgacctattccagcatcacagcccacagagccccagggcacgcgagttctcatccacagggcttcacctctctgaggaacatttgttacctggcttcctttttggtttcctgtggtttcagccttgtcttaggaatagagaatcaaagagaggactcaaacaatacagacagaaccagcaatcaaaaactcatgtgggctgagtgcaggctcctggaacgcagacactggcttaatcacataatgtcttttatacaaacctgacagaaaggattatgtgctctattacctttttctttacttcagaaattcgaaagtatcctcatcaaagaactcttagggaactttaatgtgcaatgtgtagacacaaataatatcttgcccctaagtctctcaatttatgaaaaacagagcaattccaagaggggcgaagtaaatccatccagggtgaacaaccattcccacagccttggtgcccttggggaggatcagaagaaatagaatataataataattgagcacttactatgtgcaggcgttcatgtgacactcccaattcctgccccaggaatagccccaggagtttactcctgagtcaactcagcagtagacagtaagtaaagtcagcagtttactgaaatgcctattggacagattgttctggaaactgacctgcttgctacatttgccctgagccttccttggagctaagcatgacttgtctcatcaatgtttctcctttcctaattctggttttgagcctaggcttcctgctacattggcctaccaacttgatgggcagtttatgcccttgcatcttgcctcccaaccttcttccctgattcccaaccttccagttttctgttctgcaacgctgctctggtgcagcatctctgtggactgagagcctggtgagggacccctccagatttggcctgggattctttcagcctggggagcatggactggacttgctcctgtcctggcaggacactcagagaccattagagctagacattgcattcatcctggagaggcttggagagatctgctgagggatgggaaggagacaaagccagggaagcatatggagggccggagcaccacgtggctgcttactgagcaagcaggctgccatgttctgcacggtgtgaggcctgccctggaagcagccccggcccaggtacatggagctggatggaaatcaggcagcaggcctggtgcggggcaggcattgggccgaatgggaatttcacaactcctgccttacctttctctttatctcttaatcgactaaagggaatccacaggaggatgttcagacaagccagggcacacctttgactgtgttttattgtggtttctgtggctttgggactgaggggaagttggaggcagccatcctggctgattgcagtgacaagataaaaatgcaaagaaaatataataacaacatgttgtaaaacaaaagttcagtaattcaacagaggagatatcgagtggcatgagtgttattggaatttggagggagagagcttttcaaagtgaagtgatgacagaaagtgttcgtaatggacgtagaattaagtcctagaagataagattcctggtaggtagacaagcgtgaggaaggtgttctaagaactgagtaatagcatggacaggagcgtgggatttaaagctgtgagtggcagctggcagaaagatagtctatttgcagggataagtgaggctggcaggacagcttagggaacagttacagaggatcccgaagagttctgtcagctggccgatattgaggttcaccacataatggaaacagtgcttagcatttcccataactcacatcaaatggagaagtttgaaatatatactgtattgtaatttgattattaactgaggaaatgtatgtgtatatgtatatataatcttgagtgggatatacttgtttgtatctcctaccctcaagaaacacaattctacgcatatcttgggatttcaatgcatctataaccaagtatatgaataatattttgacacagaagaaaacaatgctgaaaaacagcacaaccaaaaccattttcaaaacccagcacagtgcctgcctcccggtaccctccagtgacactttccttgctagatcagggataaccacaacaagtaacaggtaagagaggcagtctctgtctttttttttttttttttttttttttgtataaaatgatgctacatagatcttttgtattgaccacttcctcaaccactgaaaggagggacagggattttctttttcttccaatttgaacactactcagttcactatcaaccatgcctagatcttggcagggcaggggtaagggaaagtgcatgcaaattgtctacactgcagaaaagatgagaaagagagggagagaaagaactctcactaaaggggtgtgatggcctcacaggccatgaaatgggcgatatcctttgagacgtgcaggacaaggcccagaagcaacaagaaggcactctcagggctggtgagcaggcagcggactttgccctccacgtgccccagaattttgctgtgcggtttcattaacatgaagataaaatggaacgtggctgagttacagcaactctagctcatgtttgcttaaaaagaaaataaagttctgtatctcaatccatcttgctttggctggggggccggccaggttcccgtcatgtcagtgctggcagtgcagggagagagggtgtggatctgggactgccgctgccggcttgtttagaaacatacacactgccggccacatcaacccgatttggtggtaaacaggggtgccgttcatcatgacagtgtcctcatgcaagaaactttgcagttacagccacgagggaagaaaggaaaagggtccctgtttgtgtcagccggaaagatagcagaggctagcgtgtttccccttctgctacgggcttcagctgctccatgcatacacggttgtttccttaccagaaatcccagatgaatctatttcaccagtatgcctactgaaaaccaagaaatccttcatagtagcgaaacgagtgtttcagactcagaaaaaagaaagccagagtttgaatcttgacgctgctagtaaccagccttgcggttttgaccttgccaccttgggcctctgcttacagtgtatgaaatgataagaaaggctctcctaaggcacgacgtcattacaaagatgcaatgataacataggtagtgtgtctgaaaactttttagaaatcactttcccactgtgagatgacattggtgcagttaaactttatttatttgtgtgccaggtcttaatatgtttcttgtgtttccgtttctcttacgagccttgccactctcattatttcagatgctaggcaagctggacagaagctgagcattctctaatttgggggcagcatgttacaccacagcacgtgttcctgcatgactggtttataaaacattccgagactctgtggaagtgtttgctgtgacgaccttaggacaaaaattgcatagatagaaaatgtaataaatctgaaagtttaatcctggagcacataccaggaaaatatgaggcagtgctcaagagtgaaaattgttctctcacccatcccatgaagaaagcaaaggctcattcctaccagacaggaaggggcatgttcatagacgtttaaaaggcaggagtcattcaggaataatagtttgtttgaaagttacagaccactgcaatacctcttgaatgaatttcttcctgacaatctcagtatatggtgtataccacagcctcttctccgtctttctggctgtctggacagcaccctctagtggttcctttttctccaaacatttcagtgtgagtgttgcaggaaggactaatttcagaatgctctcccacccactttttaactttagcagtgcaaagaggtgttcctgtctcctttaattccgctataattatactggacagagaaatagcagctgcggttcaaatgagtaggcgccattactccctcccaaatttcattttacttttgctcacacagcaaccccaaccagactttcattagaaatctctcatacggcttttgacttagtgtttctgtgttatgtggataaattctctcctgttaatgaactgaatgagattgtccctccccctctaccaataaggggttgacgtcttacacgcaacatttctacttaaaatagagcagccattctgcctatttcacaaagggcagggctttgaagccacccacggcatgagctaacttgctcctgtattaagtgaccttataccaagtcacttttaaaaagttgctcggatcagagcagccacagtgcagtgccctcgagttccccttgcctgcagcttctgtgcctcagatggtaagtggcagaaagacaagtggctctgggcaagtaacagaccctctgagccttgtttcccaacacacccaccctttccttatctgtagaatggaaactatgatgcctctcttgcggggtcagtatgagtactaacttagtgcctggaactggggccatcaacaaatgtttctcaaatgaatgaataaatgttcttggtaatgttttgggcaccttgtcagtgctttgaaaagccagctggtactcttaccctgggaaaatgtccaaggccatgagatgggaaagagcttcgagtcagaatgatagattcaggtgccatcactcgagaccgcaggtaagaggattcatttctctaagcctcatttgaataacgaggacaattccttccttgtaattatgtagggatgacagacattaaggcacagagcccaggagctggtatgcagtcagtgctctataaatgttatctcctgttcaatttattcctcaataattccaggtgtaagttaaaggcgctctcctagacccaaagtcagtaaaagcaagagaattattcttctgccttccctgtactgaggggattgtatatttcaccaggattaggatcccttgccttacataaaacattgacatagaattccaaaccaaactgcatcctctggaactctgagtccatttgcttccgatgaaactgtccctgaggggagaaaagagtctttcaaatgcttattagaatagctggaaaagctccttggatgcctaatgttcttaaacagcattttaatgatttaagggtaaatgaactagaaacccatggatttcatttcccttgaaatacatatacatttaaaaattaagggggaaggtactcagagcaaaacatatttgtgatttggtcacagccagagcacttacagtgagccgagccacagtccagcaagctgccgcgcagccgcatggcctcagctctctgctgggctttgcagaggcttggtgtaggcagatggtctgtctctccagtcgcactgggacgagggttttcctgtgccaaagctgaggtgctgaggctgtgcagaaaggccttctgcagggtcacgcttgctcagacccagggactcaggtatacagggtctggaagggcccctccccttcatccagaaaactctgcaccttggctgcagcaggagcctcctggagaccctccctggccagggacccttgtttcaacgaagggttccttttccctgggcctggacaacccagctcctctgggtttgcagaggaactcattccctctttgtctgtaagcctagggccttgatacttcccaagttttcaaatattttatattttctcctagttaaaggtcaattggaataaatttcctccaagttcttatccaattaacataatggtcttttccccgagggtggaggctgtgccctcagctttttgtttcctgtgttttacgtttgttttgtcacacagcatcaagcaaaaggagacccaagctgtgcgctggcaggccctctctcctccccaggctcttgattactggtctattcttgaagctcacttcacgtgttttctccaggatgctttttgacaactccagaccaccctggtccctggaccctgaaatcccacacaagaagaatctgacctaggacaccacaaccgcagaatacctcaataaaagcaattgaagactcagtgggatccagctgtaaggccagcggatgcctcggtgatgaagacaatgcctcttcatcttgaaagacttagcgaatgcctattctgtgtcaactactattccacaaactccatattcacccattcactcactcactggattcattaattgtcagatgctgtgttagtcacttttatatgaaagtcactctgttcttttaaccagcagtaactaagcttgctttggggaaaaaaatataaaaacattaaggaatgaccaatgcctacaagatcctcacagttcagtagaagagtcagtgctctaaataaattcttaatagtaactagcatttctatagtaattcctaggtgctaggagctgttatatgtcccttacatgcactagttcatttactccatgcaatagccaggtagtagtaagtgctattaatatccacatattctaaatgacggaactgtgacataaagatgagatgatctgctcaaggccatacagctcctgatggcagagctgggagtcaggcccaggatgtgcaactccagtgtctgtaccttaatacttttctatgtgtggtgtagttaatgttataatattggcatatgttatgggaacacagaggaaggagtgatttcttctgctgggagtagagatggggatgacagaagatttgccgagaattgtgtttgagttgcctgcataggtgtgcgatgcatgccagcttgatgtgcaggctggctctgagccggaccgtgctcctcatcagacctccttctccctccacagggaagaatgacctgacaaactcaagaggcaagccaatttggttactaagcccaggataattcagatgtgaaacagattaaactcatttgcaattaccagacctgtcctctttgtggggagcattagaacctcttagcaattcagttcaatgagtattggcattgtgttggatcactgcccttgcatggcttgcacgctatctagaagaaaagtgtgtgattaatggcaaataggcttgcattttttctctctcagtgttttgttttccctgtcctcccattatcagtctagggttctcatcagaacaatgaaatatcagtgcctagaagtaggaagtaaaaagaggctgaacagccacaaaatggtttacaagagaatgtcctgagaaagcagagaggtacacggtgtcttctgtaaaaatgagaggattcagagttggtggccggcgctggaaggctgctcgggcactaattagttgtatttctccagcgtgcttcctcatcccattgggtctttgcttccctcatcatcatcattattattttattatattatcaatattgttattattattggaatgataatacccaggttgcagaatttctgagaaatacaaaataaataccatatgtgaaactgcaagacccaagttagatattattggtcaacacaatcctattttcttgccgaactccattgaattccaggcagatctagaatctggttgccttctaatttgggccaaaatctctgaccactatggaccctgtcaaaggttagcaatgtctctgggagtttcttgtgccagctttctttctcttttttttttttttcaggttatggatagctcaagtttttccattcctaaggaaatctcagctcaatatcagggttttcccaaatttcaccttgagtgccctggctacctctttctgcataatctccagggtgattcgtccactgtggggtgatcagagatctcaagggtatgctggagttcctaaagctgtattgcagcacagacagacctttctgcagcagttcactccaacacaacttgtctaacactttttctcctctccgtggatttctttccagttctctctatctcaatctataccacccacccagtcacccaaccagaaacttgcattttcttgatgtatccttttccttaacattcctatctatctttcagttcactcattcattccatttactctcgttccttctctctagcaaattgcagaagacagtgtcccccttagggtgttaggttcatttatctttctgcatttttataataagagaagataagaaaactaaaaggtgtgtcaatgaattcccatgggaaaaagtgagaagtgattcagtgatccaatgatgtcccatctcccaaggagaagaattggaaggcttcacttgactgtaggtgaccattaagtctgctaggtcatgtttagcatccttaacactggaccagtgaaatgcctccccgaattgcgcaatagcagccatgacaccagggagatactccagggatgtgctttcctcctggaatgagactgctttgctgctagcagaaaggtctctagaaggtcagaggcagggaaactggggcttggggggaagagagcaggtgggtaaaaagaggagtggggaaggtgattatgccaatatggtcctgttttcttctgactagatggtcagaaagagccagtcatgaaggtttcattgtggcccaatgttcaatggtgttttggggttaataagaaatgaccaaaattggtgtcatgtaaaaaaagaaaaattacagagttgagctggcagaagactttaagtaataaaataagtaaatataaaatatggtacagtttataaaatttatggtgagttgttttgtagctagccttagttgattctatcttgcctaagaaccacatctttccaaaggcattcagcaaccaatggatcttccaaatgtaaagatcagtatgcaaacaaaagctagaccactcatacccagcatgccctaattacggacactgatgttcgatatttttctaggaattattgtaaattctttatacatgttacattattgccagaaccgcatgagaaagtaactattattatttggccaggcacggtggctcactcctgtaatcccagtactttgggaggccaaggcaggtgggtcacctgaggtcaggagttcaaaaccagcctgaccaatatggtgaaacactgtctctactaaaaatacaaaaagctagctgggtgtggtggtgcatacctgtaatcccagctacttgggaggttgaggcaggataatcgcttgaacctgggagacggaggttgcatgagccgagatcgcgccattgcactccagcctgggcaacagagcaagactccatctcaaaaaataaatacataaataaaaatttaaaaagtaactatagttattccatcttcactgataaagaaactggggcacagagagatcaagcaactttcccaatatcgtacagctggaaagtgatagtgtctgcatttgaacttaacctggctgggtccagaggctaatttcttaactattttgtcatattagctcacaaaaaccacatgagaaggaaatgatcctttactgagttaaaaaattaaacaaaaataaatagcatgcacagatgagagaaacaaaactaaatgattattaggcactaatctctgccaattttcagtcaaaaatctaacttcagagagccaattatttctttctctggatacaagttttgctgctgtaaaatcactgttctttattgttgtaatcacatattagcaaggttattaaatacacatatgtattaggtttgcaaaagcctgggatatagaagcgaaaacaaaacaaaaaattattccaggatcatttcaatgttcagttagatcacaaatacacaggtgacatattttaataggggttgacaggtggatcagtggagcaacaaattatccccaagggagtctgagaaggtttcttggagacatgcagttaatattcatttgaaagagatggattgagatgcatcttcttgggggcccacttagaatggtgatatatgtaatttgggaaaaaatcatattataattttatattttgaaagccaagtaaacattttaataataatatgagcaccaaaaattaaagctaaataaaatcatttttgtttgtgggctatgaagaagatcaaagaacattgtatgagtgtttctgtttttaaaataggaaaaaaaaagttataaaaggttgagaagcacgtttttgaaaattaagcaaacttgtgattcaagctgtacaatgaatatgcactgtgaaccctcccctctactcttacaaccaagcaataacaaatattatctacctaactacctgtctgtctacccatccatctatgatttacttttcagaataaaaggatatagccaggcaactgggcacggtggctcacgcctgtaatcccagcactttgtgaggccgaggcgggcagatcacgaggtcaggagatggagaccatcctggctaacacagtgaaactccatctctaataaaaatacaaaaaaatacaaaaacttagccggatgtggtggtgggcgcctgtagtcccagctactctggaggctgaggcaggagaatggcgtgaacccaggaggcagagcttgcagtcagcctagatcgtgccactgcactccagcctgggcgacagagcgagactccgtcacaaacacacaaacaaaaaaggatatagcaaggcttgaaatcaaactggataggtcatggatcagaaaagaaaaagaaatccagttgtgagtgggggttagcttctccagattcagcaaataaaaatacaaggcaatcagctaaacttgagttttagtttaaatgcatgagacatatgtaatgtaaagaaaatgatgtgtgtttatctgaatttaagtctaaatgagtgttctgcattttacctcaccacccatagaagccacaggcctacaaagccccaacactggaaacaggaaaggtctacctggagccacagccctctccatctagaaggagctggatcctggtaaagctgggaggcaacttgtccccccaaaagcacaattagccagctcctcatgagcaaagaagtggtcagtaaggagaaatttggactcagactccctggggagactcagagttcctgagccttaggcaagagtttctcaaatctctcctctataagacaggatcccagatagactgtaggaatgaggctcagcctgttagccttggctgtggagacctcaccagcaagacagctgaaagtcatccactgacaaaggccaaattgaagaagagatttcagggagtgaggctggccctatacctctttgttttacttgagaattggccatccaaactcccattttcttcctgtctgcagttaccaattctgtggctgcaaaagcacctcaagaaggtatttccagtttgctttgtggggtcattatctctgtcttccattatctcaccagatttgctttctcgaccctcttcttgtccacttttccaaaaggctcttatcttgcccttcctaatacctgttatttgcctcaatccgctccacagtctaaaagtccactctatgacccctgaagggcaaccgtgtgccacatcagtcccctctcagctggaattctcatataacccatagtgttagaacagtctgtcactcagtatttttagttcttaaaacctcatgtttcatttttccagtggatgccaagaggatgaggaaaatgctgtagcagagagggaaaatcaatatcccacaggaagccagcgctcgaactgtttgctctgtgtctgatgccgggttgtctggggagaatttcacagtcaagctctaagactgcttgtcttttcccaaagttttagtgaagaatccttctgaatatctgctctcccaggagaagagaccaagacatttaaagtgctctttaacactgcaattcttgaaagatgtcaaagaaacagcaaagggtgggggctggaagaatcattgctcttttcccagggtacaagaacctccttaggggagagaagaggtgaagaaggcatgctgctgagaaggccaggggctggaacctaggtactgcaagtgtggttggtttatttcatcattattggaaaattcatggaattgatttaatgctggtctgttccttccatagcatgtgaatcatggaggctgcttatttgaatacatagcagaagctccctgtatggaaatagcatgtaaatgcagatgctttgaactcaactggaagattaaccctcctttaatttaaagtgtcctttaaattatttttgaaactcctttctattggagttgactttgaagatagactcattcattcagtagtgtggtaccaagcacctactcctcaatctatgaaaggctctggggacacgaggtgatgaacatgacagttactgaattatagagatcatggatcagtagaaaaaattcagatgcatttgccatacaatatgctaagtgctgtggtggaaacagtgcaagacagcaccgagtgcttagaaaaggcctgtcagagaagcatgaagggttaagaaagcttcttggaagaagtgactcctacctgagacctgaaggatgcagagtagaaaaatagttaaaataagagaagacagtgtttcaggcagagaaaaccccacggacaaaggcccagagagagggagaatcaggcgtggtagtgaaagtgaaagagctcagtatggctggagcctagaggcatgggacagtgtgggtgggagactgtaccaggctttgaactcgagcatctgtgtagacagtggcgacacagtcagatttatttgtatccgacaagcagcaggaggagcagatttgagtgagaaaactcagtcctttttttaatattctgattttgaagtttctgtaggatgtccaattaatgatgtccaaaaaacaatatataattctaaaacacaggagaaagagctgggcaagaaaaaataaatctaagtaacagacattggtcaaatacctacaagatactaggtatcatgatatatatattaaatacgttatctcatttaattttacaacaaatgtataaggtaagtactatttggaagtgagaaaaatgagttttgagatgttgaatcttttgcctgggatatagatttggaaattataacacttaaagttgaatttttatgaaaagttacatggcttaataatcaaacatcacttggacaattctgaaccaaagttattattagtgaacttaatcttccactttacgttgggcttgcttccaagtggtaatagccatttccaacaaccacacccatgctttaaaaaaattacatgtgagggaatatttcatatgaattcctaagaaaatgtcttccatgtttgcttcaaatattagaaatagtccacataactgtgaagcatttctcagaatgttatcattaacattgttacagctataataacatgattatttaatatgtttaatatctgtctctacttgtagaccccaacattcttggagtctgagactcatagagagggtatcgataggagtacagatcccagtatgttgcacactgtaagaacttaaaagaataataaatcgagtgaacaaataaataaatgagcaaccactagccacagatggattcctagaatctacagcagagtgtccccaacaatcttttctctataaggaattgttgcagtggtaaattgtttccccaaaggaggaagccaccagcattcaaatcacatcacctttcaaatcaccccccagatgcctctcattgcaaaaattagcagtaacgcgatgaggctaacgtaagggtagacacctccctgcagataataacgagaaccatcagcaccgacttagcttcaatcctgtggcagtttaagaatctctaagaatgcataagtaaagaaaaaatagaattacgtttttctctttttccccatcccagcttccatagcaatacgacagagcctaaagatgcaggccttgagtttatgaggcaaataatgaagttgataaatgggtctgcactctgagggctggaatgaagattggaccggggccggccggcactggagcagccctctccctccatccattctacaaggatccccagtcagccaatgcaccgggacgctgacataaatcaggggcagcaacggatgagcatggagaaacggcctggcaggccctgcactgcggccataaatcaggaactaattcaatcctgtgagatgcctcgtttgattaatttatgtcagcgttttctgtgttgtcaggctggtcccttgtgtcttcccttccctctcattctccaccttctttggcacaaagaaatgcttccctcccctaccacgacaggaagaaggaaatggagctccggagtaactcctagaaggcgaagcatgattagaaccaagccttcctgccaaacgtagagacctggagagagaggacaggggcctcgcatgaacctaggttccaggtcagatgaaatggccatttctagtttctcaaaagccccattccctgtgcctggtagtgaaataaggcagctaaaccttacctctggatataggagaaggaatggttttctcagacgagttagaataacataccaacatttaattgtaatgacgtaaaggtgattatgaacattacgatttataatagtggaggactggaagcaacctgcatacccaaaaatagtcgaaaagagttgtactctatctatacagtaagtatatgcatttatttgtgttgaaaaaatgctcatggaatgctgtttagtgaaaaaaaaaaaaaaaaaaagcagggggaagttaaacacctgagtgaagtgtgtgtatttcttgtctcctgaaaaataaatttatgtttgcctatctatattttcatctctctgactgttttagtcattcaactctatattataattcatttatgatgagtgtatacttcgtgtgcactagaaaaagagtactttaaaataacctgtaatcccagcactttgggaggccaaggcaggaggatcacttgagatcaggagtttaagtccagccagagcaacaaagtgagactcctgtctctacaaaaaatttttaaaaagtaactgtacatggtgttgcacacctatagttccagctacttgggaagtgagatgggaggatcacttgagcctaagaggttgaggctacagtaagctacgattatgcccctgcacgccttgttaatcttggaagtagaattttagctaacttagccacaaactcagtcacataataaaagattttcttggtgttttaggatcagtctgagcagatttaaaaaggagactatgttgtatttcagaggcccaccatctgtgtgggcagacagaagaagaccacagctcaattcagatggaagaggcaacaatcagaaaggatgtggctgagaggaaggactcacatctgctgtgagtccactggagccatgagtaataacagtgccttctattttagagctggtggtgagaaagctctctcaaagcctgacaagtcatctcctctactgcttatttattcgtgttattaaagatgtttataccttacttactttggtataggtctacaagtgtaacggaagagaaaaatagaaaaaaaaaaaaaacagaactaggttttccatgatggactgcaacccacgacaggttacatctatcaagaacacagtttctctgttcacacatttaattaggaaacttgaaattgaaaggaaaggacagaaaaggacaaagagccttaaaagaaaattctgtaattcactgacttttttttttttttttgagagtctggatttagagtgtttctagatgatccgcattagatatgacgaacccactgaggtcagcatgcacgatgcagatggatacacttgggagtctaaattctatctcccttcgcagctgagtgctgtgaacctcagtgaaacacaagcaagaatgtgcaacggatgagacctgtatgttgggagcctagttctttattccataaaaaaaagtcgtgcctgtggttatgaaaaaatgttcaactaacctagaagagttcagctaccaagtgaaggattatgggaaagcagtattttttcagacctgggtatgcatgagtgatacccatgaagctttatgaaaatatacatctcctgggcccctattaaacagaatttctgtgggtgtggcctccaagttcatactttaaaatggatctccacataattccatgtacacccaggctgggtaaacactgagtttcatgtatttattactattccagaaacaaacacaaactcttgggtggaatttaaagagagcaaggttttaggctggtgtaagcaagcatttttaagatagtctgtgcaaactcaaagctgtgcaaacctggaattgaatgctccatgaggtaatgaggctgcatcaggaaaagagagcaatgcagtagccttcattttcctttttttttttttttcatttgtggcactatttcaacatgagatttttcaacagcattaggcaagcaatatggtttggatatttgtcccccaaatcttatgttgaaatgtaattcccaatgttggaggtggggcctactgggagtgaggcctggtggaggtggggcctgctaggaggtgattgaatcatggggtgcatttctcatgaatggttttacaccatcctcttggtgctgtcctagagatagaagctctcctaagacctggttgtttaaaggtgtgtggcacctccccttcctcttgctcccacttcaccttctgctaagattataagcttcctgaggcctcaccagaagctgatgccagcaccatgcttcctgtacagcctgcagaaccgtgagccaattaagcatcttttctttataaattacccagcctcaggtatttctttatagcaatgcaagaactgcctaacgtagcaaatcagtcataattgaccacacaatctctgctgtggtctaaaaataaatcgcctgcaagaactctgcagctgtccggctaacaacttggccaactttcagcagagctgtgtagcaccctgaccctggcccagccatgaggctgtcttcacacactccttgggcatgcagcttgtcttcagtgccagctcagctcctcctgtgccatcatcctgccagcgggaccctggcaacaccaagttgctcagcaccttcagagcaatggtccaagggccaggtgtcaccacaaccatgtatgtgtgatggttctgtaaaaatgaagtgtattcatttattaatatttattcatatttgagagcacatctgtgaagggctcagggcacagcaacgtgtgtctgtgtgcctgttgatagcgtctgatccaagcaggggctagatgcagacctatcagagatctgaaagaagtgggaaataaagctggatgactttgaaggactttttaagattctatcatttgaaggaaggaagtggagagggctataaattctggcagaaccctgaggaaatcagtaatcttgaaccactaatgctaatttatgattttggacaggttacttgaactttattaagctgagctaaatccactgaaatgaatgagaaaacaaataaacaaatcaaaatcctgcttcctgatggacaggaaagactgcaccagaccctagctttcccagggaaaggaactctagaatctaatagttggagtggcaataaaaaatgtgaatacaactccagttctgtacccgaccctgcccggactgccccatggtgcaattccctcaaagggcaagacttctcagaagcatccagtgaaatcgcagtaacagtgggtggtacactaaggtccacagatttttctagctgctcgagcaaatgtggaatctcatggaatcggccccacacactcaccgaaatggctccaaaatttgatatcaaagcatcaaattaaacattcaagatcacttactgcagactttcatttacttcatgaggaagaaagagaggaaaggaggctgacccagtgggccatctggcctctttcaagaggcctctgttcttttgaaccacactgaataaatgagagctggcaggaggcaatcccaaggtttaaggcagaattatgatagttttgtcaatacacatattccaggatccgttttgatcagtcaagtggtattcgtttccaaggacaactgacaatagatgagcagattcatgagtgctctaaagtcaggagctcttacattcataaatgtgataccaacacacaaaggccatgcaatatcactgggcctgacaagcctcaggcccaaaatgggaatcacagcctggatgacaaagaggtgttagaaactgatttttggaagcacggcctctctgctcatggttcaggcaaaggtcagagggtgtgagtaccactgtgtgtgcgttcctcagataggaaaatggtgcagagcttgccagccacaggctccctactctgggggacatggttcgcagtcttctgcatggcctggcccagcctctgggaccttctgcgatctggaaggtcacttttcaaatatgaatatatatatatatgaatatatgtatatatattagactcttgccaggtggaaagtacagagtagaatcacattttctatctaccagaagcctctgggctcgttggggaaataagacatacttctcatccagctagagaaaggacagaaggaagcagcattttggaatggagacaaccactatgtgggacagtttcacaaccaggacagtgtgtgtcctgagcatgaatctgagtacgcaaacgagcagccagacatggagaggccagggtgccagagaaggaccaagtgagaagggcattcagccgaggtaggtgcttccatagatgctttaattcatagtttgggggagtttaataaacataattgagttgattgctcaaattccaaaatgagaagactattttaagcatgcagggcttacagaaacacacatacagtatgcagatgtttcaaagaaaaattcttctattttggatttatgattgttttcactcgctgcctctaaaggggaaagactctgaactctgatttaatttcttttaagtaggcaaaagctcttttctccatgactggctattccccctcccccattttcctctaggcacccatttcatttactgtcctgctggctgtcaggctagagacccctctggccctcaccaaaacagaagaaaactggaggcaatgtctaatttttgtctatgtggcactggcttggtaaagtactttggaaatacataggcacctgaaagatacaaatgtgaggttaagagaaatcaggaaattaaaaaataatataaataaaataatgcactagttaataaaggagaagatggtagaataacccattcacttccctggaatgcccctagtctaggataatagacatctcaggggttggttggcatttcaggggataggcaggtgcagtgaattgagccctgtggggtgggacaaagtgttttctccagcaggtgcccaggaacagcacctgggacttctcgggaggagactcctcaccactctacaggggaagggtctggttaacatagggagcggggccccctgaggccagggagagcggcactctctttcttctccatccttcactcagcagacttccattaggtggctgctaaatacaggatactgagaggtcaaaggagagcacgacccattctgaagaagctcagagtccacagagatgtagacccacaaagagggactgtgaccactgatatcctatacactgagagcagagtgtgtggaacacaaaagtccaagtcaggaaacaagatgttggaactacacctcgaaggtaaggttgctaggaagagcagaggaaagagcatttcaaatagaagaacagcctcccaaaaagtaggtgagaatgagatgcaatcagtaaccctgtgaggcttggtggcaggaggagagcggccagtgggtaaccatggaggggacagctagtaggagcagaaggtaaagctggaaggtgaagctgggcgcaggtgatggaagccctggaataacagaacatttgttttaggccactaggatcccgcagaaggcaaccatgggccttaaatatggtccctgaccctgcttaagaaagacagcaagaatcaaaaaaggccagaagactagggtgtgagtgatgagcactgctccacggctgtgaaagaaccgtaggaagcatggcctttcacacagtcccctaacctttacagcaccacccttggtgagaagttggatgaactagggagctggggccagggtattgtccttcctgccgtagcggaccctcacgtgtgcgttcagacctgcccagacctggcctatgcattacgaatgggtaaaatgcccctcagtctctggtgggacaaacacagctgggttgtgcaggtggacacgtggcagcagcagctgattgcaaaagcccagaagtggatgaactctcacttcctcccagaacctccctccctttcatcaccactcacccctgctcagtgtcaatatggttcaaatcatagcaaatgtaagcttcatggaaacagcctgcaagaggggcaagaggatctgcacaagaatcacatcccctctgctccctccacagcgtaggcacctttcaacttgaagaagggaaatgagaggaagagtgtctccggagaaagatggagttcaggctagaagggaggacacatggttgggaggaggggctgtgagtaggatgagcgtcctaccttgctttccctgcctgcagaataggtatgacatcgctcgccctcattaaggctgtgaaggctgctttacggtacgcatcacacgcagtctggaaagacgtctgtactctctgcccatgagctaagattgtggagacagcgagtgctcagcaaagcaaaaaaaaaaaaaaaaagtggggatgagggaaagtaggatttaaaactgttttatgttcacataaaaatctgcatgcaagtgttatgtagcaactttattcataagagccagaaaacgggaaacaccccaggtgtccttcaacaggtgagtggctgaataacaaccaagctaaatctcaaataaattatgtggtttaaaaaaatccaattctgcaaacttagatactgcaaaatttcatttgtgtaacacttttaaaataacaaaattatagaaagggagaacacgttagtggttgccagcgtttggggaccggagcagaaggaagatgggtgtgtttgtgaacacacgggtcattgtggtgttaaactcaggaacctacacatgagaaaactgcaaaggactaaatacacacacagcggtgcacaaggaaaaccgggcgaacctgattaggaccagtgggttgtatgcatgtcaatattccggttgtgattttctactagagtttgataagatgttactgcacgggggtggcgggggtggactgggtaaaagggacacaggatttctctgtatcatttttttcaactacttgtgaatctgcaattaactcagaatagtgaactttaaaaaaaaatttacaaagtggggggaatatgaacctttctccatctattatacttttgttctacagggcaaatattctcaaaaccaaactccagggtgatccttccttccttcctcctcagaaatacctctgtccaggctggatctcagctactgacactgtgctaagatccctctcagagctgatcaatgccccttgagccctcagtctggaggaaaaaagtatgattggcaaatgctgccatcagacaaattactaatccatgtgctcacatgtatggtgaggatttgcataaattggacatgtttcacactccctttactggccactctctcaaagccccatcttcaaaaggcaacagcctagtactgatccctccacagagtaattggaaggcagccccgatgctgagtccctcctccaaagctggcacagtgaagcctcctccaacatctgcctgcacggtgcagcttctcttccaatctgccttcaacaaggccaagcagggcccagaaaagagacacattttcttaatgaagaaggtcccaaatacatgctccttgggaagtgtcactgttgttcttctggaagaattctccctttaggtgattaacaccttcagattttcaaaacaaaacgtgatgctacccctaatgctaaataactgtactgccctcagctgactgcccatcttcagtgcctcaccaaagaaaatccatgtagcaggaataaaagaagtcttcctttgcaagatgttaaccttctgagagatggctaatctcttgtagctgaaattcatgctaaaatgataccaaaagattagccattccattgatttcttattattttggtgctagaaaaacattgtaacctttataaaatgcaaagaagagatgcagcaatgcaatttctgtgtttatctaagctgaacagatctcttattcttttttattaataccaaaccaaggctaacaccttgccagctgcctgccagttatgttctccaaggataacatgacaggaaaaaaaggaagagacaattctggtgctaaagaaagcagccgcctggatgctccacttagaagaatgccacttcatcctgtctctaaaaggggtatcctaatgtccaggaaaaaatgccaagtgctgggaacctcccagggttgccaacagtggcaatgtcacctgttggaaactgagagagccagagcggagatgccaagaggtggttcacctgcaaggaaaacaaagtgaaatgggaaagcatgttcctggttaggtggggatgagtttcgcaaggcttcatgttatgtgagtgcccaggaacgcggtggtgctgaagcgaaaggatgtgcatatatatgatggctgctgagaaccgtcatagatgcctgttctctcaaagaacaaagtcattcttcctggaacaccacgaaggcgcccaaccccaattcatctggctaatctgtagttctaacctgaaaaccaccaagatgaggactcaagtgtgtcaaggaaattgaaaacgtgataattttgttagcaccacctcatgaggtgagctggtggaggttatatatggtgctgtttttactttaaaatatgaataaaatctcattaataaagctttctctgggtccacatctctgactataaatacctacagaaaaggaaactttatgagtcccaatctcatgggatttctaggtagacctgacactctaaggaataaaatctgtttttagcttaatctttttggattctgccaaaagtaaataagaaacgcacactgactgcacgatttctgctggataaagcagagacagagaaaaacccttcatctcaagctaggtcttaaattctatctcactctgcaaagttacatctcactggctaggacaacttttcactccacagaaaatagttcctaaacctgtaggatttcctgaagaagaaaacattcctgatggtggcagaattccaagctgagaaataagactttgctagtattactgaatgactgtctcatgactggaaaatattttcttctaactactgtgacataagtaccatcccttcaaaaaacctcttcccaaacctcctcttccactcatttattaaggatctactatactgaaaaaatgctacctaaattttcgagagtgtattgtatgtgagatcatggtcatgttattttaagagatacaaaggattacaaggttgagtttttgccttcaaggtactcaaaatgtatttggagattctagacaaacattcaaaatacatgaatacaagtaaaagacagtatggtttagtgccaacatgaactattcagctcatgaacctgagggaaactcatactctaaagagaaaagtaaccctgaaatagcttccgaatgctttttgctcatctgtactctaaatacatgccatgattttcaattacacccgagtctactctggctcacacgggagattaaccaattttcctccaaagcccacttatttacgcagcacacacccattaccatgtttgataaaacgcagtgtagctatctggctcagcagagatgatctgagcttgacattgaaggggaggaagtagggactcagaggctgaccctaatcctgcagcaagagggttcaaaaggcaggtgcttcaggttggagtggcaagtgactgcttactgagattcatccatttgtctatttcctcactcgcttaacacttacggaatgcccactgtaataagacaccactaggtatttggggagatagggtggtgaatattatgccaagtgggaaaaaaggtaactgctgtaactgaggacaaggcagtacaacgtgcacgtgcagaagaggaggagtttactttttatggaggtgggattagtcttcttcaatgaagtggcctttgagctctcaaccttgaaggatgggaaggttatgaatgaggtaccgctggcatgggatggggaaggggtggctgaaagagagaaaggaccttccgtggggagggaagaaggcgagcaaaatcctgctggcttgaggagcgaggctggtcatggcagaaacatctgtgccttagaagtgtgctccgctggccctccgttatctactcataaaaatcaccattggcagatctataaaacccaggtccattaaattaactatctacttagagtaattaagacggggaagtctacttccgttcagtaggacagtagatctcggttaccaaatagggcagctattcacagaagacatattgactgcagttattaaatttcaacaaatatgttttaatcatatgttatttagcacaggcaagagcattatacaggatatatggaaatcttttcctaggcaggtgaatgatagccctgaagaatagagaaccgtttcccgcaggacgttttctagtctcatcctaaatgtaatttcttgcacttcccttgggaacctgagtggtgatgagcacatcttgccatacagatttttgttcgatggctggcttgattttttccttcaattttgactctaccatatttcattgcagaaaatgtctggaaacttctacaaagccaacccagctttcaaacctcatactcacaaaagtgtagggcacagagaagccaaatataagaaatgcaacatattcataaactccacactttatgaagagctagtgtcaatctatcaatcactgtattagccctaaaataccttaagaaaggcaagaactgacacccataatcagagttcattctccaattacattaggataatcattgtcggagcccatttatgtttgtataagattatttgatttcccacactaaaaggtcttttattaccaaccatcaacaccataatagcagtcctaaatgtgaagaacagccacttaaattaatacagctttctaactttatttcactgtgtcagcagggcctcactgagagccgctgcaggctgcagcccattgcagggaaggtagacagccgtctacaatgcaactcataggaaggacaaaatggtccagtgatggagatggggttcggagggtgaagaacttagagaacacttgagcatagggaataatctggaaggttaaatctactaagaacattcagtgagaaagggagaggcagagaatagatggggttagggaatgagaagcaagaaaaatggcatattttggttctaaggctcccatagatattttatttgagaacaaaaaaaacaaccgctcatcgttgatctggtgcctttctttggtgggtctgcaatcaatttatgcctatccttccttgcactcccattttcccaccatgacttgaaaagaacattcttgactcccattctacagatgtagaaacttaaatacaggtatctgaattctgtgaaaagcatgaggtatgatgatggtataatgatttttctttacattaaattctcagaagatacatgtgagtacaattttccaagtagtcactgtacttattccatatgtacttattccaacaatggtatgaccatgtttctggacatttatagcaaatttaggtttaaaaccagaaatatatagcctccatcctttgtagttatttcagatccaaacgatattatccagcttgatcatttagtttgttcatgagacttggctttcaatggcatttaattgcttctcaaaagtagtcccactctgagggaaggcgaatctcttacctagggcaatatgcaaaagaatctgctgtgggctatgcctgtaagctccaaaagagaagtttttacacatcagggatacaatagaaagaaagaacctggctacccaggctgcagatttttaaggacacataactcatttactttttgtcagtctgagatgcttattgatttataaatatcacttctgtgacctccttactgggaaaagcgattcaaattcaggcccatagctgcctctgctggcctctgaagtggatgcttacaccagatgggcaaattagaatacaggagagatgagagagtagaaaaaaggcgggggcggggggaagagaaagtagggaaaatggagaggggtaagggagaagggccttgctttccactcacctcctcgctattctcagctcactcctgggttccttccatttttgtggcctctgcactcagccattcaacagatacttaggacatgtatattatgcacaggtgttccataggtttgggttacatccacgaatggaacatgcaaagatccttgtatttatatactctattttagaaggtgcaggcaagcactaatcaatagcataataagaaagccaagtacacagcctgctgactggtgctcagtgtgggcaaagttttccagcagaggagggtgagggaactgaggctggagggagttagaattctaaggatggttctcagggtaggcctcattgagaagcctggaacagggtgagtctggttggcgtaggagggaggtcaaagaggcattcgtcgtggtggtggtggtggtgtgtgtagaggacaaggtcttcagatgatccacagcctgtttagatctgagcatttactgagaatcactgcagcattataagctgaaaagtgacatgatctgatttacattttacaggatgctctactgagaatagactgcagggaagaaaagtagaagcagggagaccatcaggaagggactgcagtaatccatacaagggagtcatggaggtgtggcatggtgctcagatgtgatctgcacctacagccacatttaccacaggcttccacattctcacttataatacacatcccacgtctttccactttcagtgtagtctcttcaaagttgcctctgcttgggtatcagctccagctctggcaggaattgcgtaaagaactactggttgggatgatccactctgcagtgcattggtttcaggcctgatggtttccaccaaaagttgtagctgtcaaatgctggacctgcttgctctctaccccaaatgtggatacctattcagttgcttcttttcgcatggtctgttggtttttctggcctagctcctcagatccaacccctgcgcaacttctacctttctgcttcaccaagacaggagtataaggcatatgccaaaagcactaaacagttaaaagaggctgggacttgaagtcccctcaacaagagggcacccagcagctgtgcaatgcagtctagagctaccgtgcttaggaatgttgaaagagtatctctttcccagtgttaggtatcatacgcatatattgtgtacaacttctaaagagctatcatatcctttatttcatggatctttgtaatattcccatgaagtacagtgtacagatggaactgtcacatgtttttatatttttcccaacttataaactgaagatcagaaggatgaaataaactgtctcagaccacacagctaacacatggtggagtcagaacacagttccaagtcgtttcactcctggtgcgtgatgctgtccaaacactcaggcagctctgggtgacaacaaaaaacaggttttgaagccttctgtccaagccaaagctctaaactaggttacctagcttcggacctctaaatcttactattttgttctcaagaggaaatgacatcaattaacaaatagttttatttctggtcaggattaagtgaatggcaaagaatgaatccatttgccaaaagctgtcattgcaattatcattaggacttcattgagttcctgagtgctgtcaaacactagaagaatcatatgggcctcatgctacctccaggagggggactgtatctttgggaaagcttcacttcacatctgtctttatcactggctctttctgtggtcactgttcaatataaattcattttcttatttactaaatacttctctgaggaagagtggggaaaacgattaaagtctgccttctctttctcaactccatcgcgatccacattgttacaggttaattcaaaaaggaaaaataaaagggaaaataatcttcacttcctcttccatagaaaatagaagattgaattaaaaaaaagtttgagatgtcttctaagtgaaccatgagaagaaaaagtcacagatgcaggagaaaaaacccacaaaattattgttttaaaatgtgtttgtatgaaaacatttgttaaatgcaaagagtttggggaagaaatataatagttgagaaaagggaatcttcccttttgttattctatttttaactataggtagtttatgttccccaaaattttcaaatgaagatctataaattatccttgctagtgaggttctgtcgcatgtagatctcacgtagctagtatatgtaccctgaatgcagtctctctgcaccccacacttctcatccaggcctgagttctgcactttgacactcacagaaggctggtttagtgatggatttgcatttactactagccaggtgatatcaccacttatattttcaaagatatcccagtacaaactctgtatattcagaacagagcccttggcccttgtcccctgccactccccactcctcaaataaatgggcaaaaaatatcttccccattctctctctggttaaatggttctcaccatccatccacttgcccaaatcaagacctcatccttactgccttctttcccctcacccctgacttcccatccatcactatgtcctggttcttcttccctcaatatatatttgctaaataaataaatgaaatcagaacctggataaagaaataaaaaatatgattttccattaaattacataaattttgaatattagtgtgtaattgaccttaaaggctatctgtcccagtttatccacttttattagagaagcaaggtgaagactaaggaagaaagctctagattacatacttactggcaactatggaacctaacattctttacaaaatacatctcatattttaacaaggatctgaaaagtggactcttaattaggaagtattgtatattggatactagttaaatcttacctgataaataaatgtagtatccattgttataaatactggaatactgagaagtcaggttgtccatctctcatcttgtttagaaataagagtccttcaggagatcctagcatatcagatatctggtctacaaagaggttgtggccaggtttcataattccctatatgaaactccctcctaaatcattgtatctgctggccactttatcacataacacacaaccagcttattaatataaattagaggacagtcaccaggtagggctccaatcaattcaaggtagactcccaaaggaaccagttgtctgagtaattgaaacaaaacaaacaaacaaaacacagttacttcacatctatccctggaggttgcttgcagctagggcaattgaacactcttctaattgaacagggaaaataaggagtggttgctgccttgtactgaacagattccacacagatgcttcatccttccctggcgggacctggttacgttttcaccagattctaaatttttattccaaaggactttaccacttccatatagttcccattggtcacaggcaggcaggatcaacaaagatataatcctacagacagtagcacacacaaatgtgcctgatgaattccaatcctgaaatccagagtccaaacatgctgtgaccagctgggaatttgctgtaagctatcatcagtccccaacatctaaaatttccccatggagacaaaagatggaaaagctgtgtacaagcttggttccatcttgcaaggcagtatgtgcaagtataattgtagccttttccagagccattttaagggacaaaaaaagaggaagggagaagggaattgatgcctatcaaaaatgttgtggtaatctctttgaatgaccatcaccatgaattcctgttgctctctttccctccctccctctctctttctcttcctatctttcctctttctttcctgacatctttattgagatatagttcatataacatacaattcactcattcaaagtatacaattcaactgattttagtttgttcacagagttgtacaacaattactacaatcaattttagaacattttcatcaccccagaaaagaaatcctgtgtcctttagcagtcacctccaatctccccatctccccagttctatacaaccactcatataatttcttttctctctagaaacaaatgactattctggactttttgtataaataaaattatgcaagaaatggtcttttgcgactagcttctttcacttggtataatgttttcaaggttcatccatgttgtaacatgtattagtgttttattttttttaattgccgaatattatttcattatatggcttgactatattctacttatccattattcaagtatcttttaataaggtatatgtttgtttcttttttggactattttgaataatgttgctataaatatttatgtgaaagtttttgtgtagacatacatttttatttcttctggttatgtctcggggtggaattactgaatattagggtaaccacacccaaacttttgaggaactgacagactttttttgaaaacggctgtaccattttttcattttcctatatacgaggtttccagtttctctacatcctcatgaatactggctattatctgtcttttttattatggcgaatgagagtgatatctcattatgactttggtatttatttccctaatgatcagtgatgacaagcatcttttcaggtgcttattgactatctgtgtattttctttaagtgaatgtctattcagattttttgctcacttaaaaaattggtttgtcattttattataaaatgcaagagttccttccctgttgcttccttgttaatgattgtagagggtaatttagaatgttcaatgtatatttcaacacattataaatcattagaacaaaataaattctatagttctacctaagagtgaaagtatttctgtatctttttcttttctgtgtgtgtgggtgtgtgtgtgtgtgtgtgtgtgtgtgtgtgtgacggagtttcactcttgtcatccaggctggagtacaaaggcgtgatcttgggttcaagcaatcctcctgcctctgcctcttcagtagctgggattacaggcacccaccaccatgtccggcttattttcgtatttttagtagagaaggggtttcaccatgttggccaggctggtcttgagctcctgacctcaggtgatccacacaccttggcctcccaaagtgctgggattacaggtgtgagcccccatgcctggcctgtatccttttcttatctccagcaatctcacagatgcccattaaaacttccatttgtgtgttgcatgttggaacccatgtacagtcattggtcatatttttaaatgggcaaggcttttggtgaatggtctgcttgtctctaacccaaaatatagaaaaccttagagctaaatagaaacacttgaactgtctgctgtttttagttctgagacaagtttgaagatagattctttctagataggtacagtaaaaaaagaacaatgagacttcattgtgcagggtaaatgctcaataaatgttggttgcaggaataaatgcacagaaggcctttgtggggcattgaattgtaagtgcttgtctttgttcgtttagcaaagcagatgaaggggcagaattatttccttcttggtcagagagtttttgatcttctgaagccagagtcaataatactaatatcttgatggccctgaatgtttttccaaatttggacagggaggaagctcatctgcagattgatagccctatctacaaatgggtctatttcccagtgtaggtcataatatatacatgagatggtttctatccaggtctggaagagaaacagatctaagttctatgtgattgtccgaccaattgcctactcatagatccagaaggaggcttaaaagttatttgttcagcaattctattacccttgcagttaccactccctttctgaaggtaaaacttgcatttcctttgtttccaccgctggttgcctattctttgtctcttccttgacgttattcaattataagtagtagaaagggacagagcttcaatttctgcaacatattggctgtttaattgcgggcaagtcacttagcctccttgagtctgtttcctctttcatacatttgggatgctaaatataacacacttcctccctcctgttcaggactgttgtgaatatcaatttctataagggaaagcactgtgcaaaaggctaaattcaaaacaaattttagttgtggttgctataattatctggtaacctccaatcaacagcattagttgcttcgtgttttcttttcttttcttttttttttttttcatttccagttttgttaacatggcatttgaattgaggttaaaacaaattactaaaataaaggttcgagataaatggcagattttttggctgtaggtttcttctctgctaacatagaccatagaagtgtttgctggaaaataaccatgggtacaaagactttgcctccctgaccaaaaaaaaccagaattgagtgcttttgttgatagtggtccttctggtggtggcaagatcaaggagcctcagcatgcctctaaactgtgcatgagagagcctgcctctttccagtcagatagtggaaccagaagaatcctggatctgtacattcctggttacaatccctccatttctgaataacataaaaaaaagtcagatcctaggtgggctggcttctttttagttggccaagaggagaaatccaaggagtgagtaaaagcatctcccgcaaagaactgagctgggctttgtttaagtcactaatgaagagaaaatcttagaaggtatcaagccaaagctactgaaattaaattatgggtaactttcaagaagtaggaggtaattcccaacttggaaacaagccagaaatgagagattgcccccatttattccattcgaaatgccacaggagttgaatgaccacaaagacaatattttccaggaaatgaaaaccactaatgggcactattttggtaattcaaatactttctttcatgataaacacctgctccttttggaaacagatttaatgatgatgtttacccatttatatttgtatactgctgagcccactgacagcactcaataaataataaataatgataataataattctgatccaaagtcttcaggaggaaaaaataagaaccaaagatttatggtcggcatatcctgtaaaaatcgatctggctctttaaatagaagaagtccttgaggggagataatgcattgatttatgattcaaagaaaatgtaattttaagaattacaataataacagcaataatcaatgtcctatatgccccataatgaaaacagaaagaaaaagaaaacaacacttagaacaatacaagctattactttagaaaaagaggaagttttcaaaagcatgatacttttaagttactggattcagcaacaggctctgtcctagatataaatgtccacattttgttcattttttgagaaagaatgttgcctagttgaggttaggggagaagctaatataccttgatgtaactgtctaagtctgtccaaacctgactccctccactcattgaagccgatggccattccttcccttcccttccctttccccttcccccactttttttttttttttttttttgagatggagtttcactctggttgcccaggctggagtgcaataggtgcaatctcggctcactgcaacctccgcctcccaggctcaagcaattctcctgcctcagcctcctgagtagctgggattacaagcatgcaccaacacacccagctaattttgtatttttagaagatatggggtttctccatgttggtctgactggtctcgaattcctgaccccatgtgatctgcccaccttggcctcccaaagtgctgggattacaggcatgagccactgcgcccggctgcttcagttttctacatttatcactatcactttacttcaggccacatcttctcaggataatgaagttagaatgagttataataacctcacaactaccccctgataccaagccctttccatctccgatacgtccttcactttgcccatatagcaagtttataaaacacaaaagcctcttcctcaagatcctttgaaaatttcgtattgcctatagaatgaaattcaaaatctatgctaatgacctagtcccaccttaccttttcagcttcatccccacattttcccttcagaaccttgctccagggacacatacgtaatgcccctgaatctctccccacttgcttgtgtctgtggttttgttcagctggcttccagcatggaattcactgctttacatgctgagacacttaaggtgcagctcggatgtcaactccttcacgtagcctttcatgattagtatcaatccctgtttcctttctactccagtagaattattaactgttccacttttataacattgatttacttctttctggtacaaaattaaatctgtgcaattttctcctagtaagttgtcggattccagagtgcatgagttttgcatgtagtaggtgcttaatatatacttattgaattccattgctacagggaggaggatactcatgggggaaaatgctagtaacttcaaatttaatactctttggcctttagtaaaactctgactgtttccatattcagcatcaccctagcattgaccaccattattctaatccatagaagtctcctcctgtattgtgcatggcaggtagcagcggttcaataaatgctcattggaggccattgcttaagtaaaaacagcacccgtgagaaaagatgctggaatcctgcacatgtatgtgtgcctttctgcaaaaccccagcttgtccttgcggaacctcattctgactttgaaaaacatttcttcaatatattaaagttcctttggattctatttccgcattcattatgacacccaatcaagtgccatggacaaaattaatgaatatgttctgccatcaatcacacagttcataaaacatctccatggtatctgtgtaggattcaattagcatgggaagaagtataggattaaaagttatcatggaagtggtctttgtcttcaaaagtcacatttacttctacattttaaaattgcctgcttatgcctcttatgtaccttcatcttcccataagattataagctctataaggactagggacacatttgtcttcttcatagctatattctccctcaccaagcagagtcttaacacatagtatatgctcaatgaatatctgtcacatgaatgatatatattgccatactaaaccaacaatggtcttgaaaggtagcgcactcatagactacaatatttctaccttttctctaagtcaaagcaattccaaatgcttccttgagcttaagggctcagagaatataaatttaaggtagtgagttgagacttttgtttgttaaattcctttgcaagaaactttagttttaaaatattcacgagctgctgagatcagtatacacctgtgtcttagcaaattgaagaaggaactaaataggatcagtgaaaataaatgtaggaggaacaagggggcttaactaattcttcttaatgactttggggtttactgcaccaaaccaggtgtggaatttcctggactccctaaatcgattctgcccctgagccttgctaggtgttattagtggatttctcaaacacgttggtgattttaatgtcagtttaatgcatccattcaagcagctgttcagtccaactctttatcttttctccatggggacttcagtgactgggtttccaccctccacccagcgatcctttcagaggctctggagagatgctcatacatattcatcttttcaaaagtgagaagacaaaatctaagccccttggtgaaggctattttctaactctcttgccaggtagactgcttgataccagaggggataggttggtgacctaagcaccaactctgaaatgtaaaaatactttgccccttaatagcactgctcactgagagatttattgacagtcaaatattatttcttctttcttatgcaaagccagcatagagtaatggaagaaaagggcaatgtttgtgaggagggtgagggacaattgagaccatcccacagctacagcaagtcaaagaaagactaatctgcgagccaagatgcatagtcaattgcccagttgcactgtggttgggcactcataattgataagcctctgaaatactaaagagctatttatttacatgtctgaggcataaggacctgttcctgtaactgcagtgaccccaatggcttactggaagcaggcgcaattctgtgtacaatttgacattactcaaagagagggcatcttgccttttctagtaaagacagggtgcagagaccgcaaaaccaaggaagccaatccaactgggagtgaattgcctggagtgtgttgttttacttcaaatcagtacactctcagaaatgtgctgtcttagttaaattaagtttctcccccagtggaagatagaatctattgaaacacctataaaatattttatacaatatggcattttagcaggcaaacaatttttctccactacacaatctctcttccttaccggcaccctgagtgataccatcaggtataatggatccttggaatctcattctatgtaatctgaaagccttggcgaggtgaaactattaaattgttgctttacttgtagaatgatacattgtcctttatctaagaaaggatcaattctttggtaagagatcattaaaccttaatatgttcactcattaaaggcagctaccttttcatttcaaagtcctctaccaaactcagcacatggtgcctgcctaataaacgtgacaataggagagctgccataatgctaagcctgctagtgtggactcattaccacatctcactgcttctcatgggtgactaaggtctggaaatgcctagataataagccacttgctcaattagatgggaatgactaatcacaggagtgagccagtctttaggttggtcatggaactcttctctctggaaggctgacaaatggtgtttatgccaatgaattccgagtcaatagctacattgatgcagctggtattgaactagcaagagcttgagatccagcaagtctgagtcaccatctctttcacaagtgcttgtgtgtgatcaactttactgatgccttgcttcaatggaacaagcgtgatccgagtaggacgcctccccaaacagcctttagtcaaagaacgggtgaaaaagggagaaaacaggcatatatctgggacgttcatagcctgaaaagaaggcacatggcagacactaaaatgccttcctccaggaggcttcactgcacaaccgccaggcctactcacaaaacctatcaacccagacagacgacctattttcaaggtactccttcccctgtgtaaggtccacacttctacgctagcagaaaataaatgaaatgatatttttcaaccttcctagaataaacaaaaactcacatggatatccttccaaaatgggttcaaaggatttctatctcattcaacgatttttatattgatggatatgatgcagctgtttaaaactctattcaattatgattgctggtcctgtacaataacccgcagtggggagatgtgttttcatagcaagacgtgtgaaaaatcttcaggagttttgtagttttctcacagttctgagttttaaaaagtgaaatggctgtttaacaaaaggacattcgatcatacattgcattttgtttccacagtaggtacatttagcaagtaaagaatcagaacaaaagagacaaaatggctctgctctgctctagggagcccatatctggtgacaacatgtaataggagactgtacaaaccaagacattgggcatgaaagagccggaaatgagaagaacttcacgattgggaactagatggacatgaagaaaggcgttgtcaggggagacaagagggcagcatgggaacacgtgaagcactgtggagaggtggactcacatctattctgttgtctcccagggcaggactagtactagcatgtggattttacagagagaccatgggagtgtgatgggatgaggcccatttccatagccacagctactgggagcaacaggagctgtgtcaggtagcagacatgcttaggcccttagggagggcctggcagaggctgcttgaatgcatgctgtggaggcgtagaagatgtgtattctggattgggtgcatatgaaccaatgagctgcaagttttcttctaatacagatagtatatgaatccctaaatccatctctgtatcttaaaatagtttatttgggaaggtacataactcaaagcacttaaataaatagcttactctcctgtacaccaagaaacacaaacaacatgatggataagagaagagaaggattactttcccagcaacaaaataatgcatataaaaaaaggagaagtgttaagctggctaactgtaaacaacggggggctctagttcacacagacattttgggcaaacctaggtcttgaggggtagaaaaaactcaggaaaagaatcagaaccacctatgcaggaggtggggagagggtggcaagagggaattgtaggtggagttctttagaggatcttacaatagtttcttgcttaaaattagctctgggggaaaacaaacagaagaatatattgttatatgttgctcttggaaattacctttgcttttattattgtcttataagtaataaattattttttgttttttagttttaagaaatttttttcttgtgataagattcacagttcagtgcttcaacatacacatatgacgctacagtcgcctagtgatggaaatccagtgacagagaggcaggggaacagttagctggatagatgagctaaacaagtcaaccctctatcttgcaaaaggactgaggggaggggagtgcacagctattctgaggttgatgttaagaagtcttggttccacttgtacattttcatccttcccaagtattccgcaaaatgtggaatatccatgctgctctgaattatagatgtgatgactaatccttcagcaacaacttgatttcccctaaaggcctctaatccttaattaatgctaactaccaacacctcatactgcagtttaccattgcttgtcttttttggaaagaaaggaaaattatccaagtctactaaagtagagtctccaagaaggcaagatttctgtttcttatttatcattaaatcctcatacttagtaaaactctaacagccagtagatgctcaaatatgtttatgaaatgaaggaataaacaaactcaatctttgcactgactcgggagagactcctgaagagaagtctttcacagtctggatccagccttcacgagactgtcctgcacacgtcccgccctccatccagccaaatagttctgcattgctcaaatgagcaccatttcccccacccctacacagctcctatctccatggaaagcctgatgtctctgctgaactctttacttactcttcaagaaccaacttgagaactttttccctgagatgtcgcccctgactgctgcaaacaagacctctctccttggagtgtcacaccgtcctgtgcatgtcacgtgggcagagattggcacactgatttctacatttatatgcacctgtctcccttagtaagaggagagtggtttatttgggggcagaagagaagatactcattttatactttttttgtcattgtttttccctctgatttttaaattgcaaatatttttctcttcacataaaaagattggaaacatgccaaagtacataaagcaaaatctccaccctcagcaatctcattcttttagaggtggccacttgtatacaattgtggtgtgcttttagaggtggttttctgtacgtgcaatctctcaaacatctctggatgtatatctaacctatagatatagatatatactaggacatagacatacagatataggtatagatacactgatatttttaaaacaagttactaatgtatgtttgccaaattacaacttattttttccacgtaacaatatgttccaatatttcccatgtcattatatgtagaagaattaaaaataaaactaccattcaacccagtaatccctttgttgggtacatagccaaaggaatataaattgttctaccataaagacatatacacccatatgttcattgtagcactattcacaatagcaaagacatggaatccacctagaaggccatcaacggtggactggataaagaaaatgtggtacatacacactatggaatactacaaagccataaaaaggatgaaattatgtcgtttgcagaaacatgggtttagctggaggccattatcccaagcaaattaatgcaggaacagaaatccgagcactgcatattctcacttataagtaggagataaacattgagtacatatgtatacaaagaaaagaataatagatacaggggcccacttgagagtggaaggtggaaggagggtaaagactgaaaaactacctatcaggtattatgctgattacccaggtgacaaaattatctctgcgccaaactcccaggacacacaatttagccacgtaacaaacctgcacacgtactcctggaaattaaaagttggaaagaaaacaatgcatgctttttttttttttaccattgaattggattccatagcatggaagtatattttatgccttttagtctacatttctaagatttagcacaattcttgacacccaataaatgactaggtcctacctacaaatcaagatggtcaaacgttttgatgaatttttctcccccattgctctaagcttttcctgagataaattggggagccatatctcatcccagtttatcataagtaagtaggtaagtggcatgagagcaagaggctgacaccaggaagatgcgttgttcagaagatgagcatttctgtatccaagcagagtgcagaaaaggcaaagaagaaaaagtaaatgaaggagaggagaaaaagatgggattttctggaattccagagagttgaggtagcagaatagcagaaaatgagtaacttggaggactttgttctcatgctgtgtctccagctcagaaaatgtcaacactggctaaagccactatgtctgagaaatagggttggaggtctctgcctgccttctcaccgcctctccaaacttatctgccagtatttacctcctaactttttaggtcagtatttcatgccatccattcattcaatcaatggttttttattgtttattaattactatgaatctggtattgttcaacgtgctgagaaattagctgtcaccaaacaaagcctccaagccttaatggagcttatattccagcggaacaggcagacaatgaacacacataaaaaataattcactgtcagccattgagaactgctgtgaaaagatagacataaagaaatagacaaagatccgggaatgatttaggtggaataatcaaggaggggtctctgccgaggtaacgttgcccagaggtctgcatgcccagaggaggtcagccattccacctccggctgaagccatccttccctcctgcactaggttgggtagatgggagatggccagtcctacctgtccgccgaacccatcctccatcattttccctctgccaccaattagctagatcagctggggcgattattcctacaacctgtgtcttgctttcaacctttgtaaaacaaggaactggactcatggcttctatggtccctccacaaataacaatcattgatggtgtgctgttactgctgtcagggggacctcactattcaaccgtcatatatcccttcccaacacagaaagaccccagtagaccactccacagcagacaaaggcagaacagtctcgccctccctcattttgcccaagtacctgagattaggagctgttggccagcggctctgtcccttgttttcgatgatttcaaggtaatgtttcttccagggaaacttcttctagtagcaacccactcagttaccctgcaagttaggccccaatattccttgtggaagctcaggtgggaaacaggcatcactgacactggctctgccacaccagccaagggatcctgccaggacccaacatgctgcttcatctcacagacatctctgggtgtgcttctgtagaaggcagcaggtggccatgagaatacataggctttgaagcctccctcccggacatgcagctcagcgcttctgcttaccagcagtgtgatcctgacccataattaaaagtagctgcacttgtttagtatcttctgtgtgtcagggccgagcacgtgacctgaatgagctggcgttttaccacaggaagactagcagtttctgctgttacataggaggtgctgttatgtcaccatcacacaaacacagagactgaggttcagagagatgataagtaacttgcccgagatgataaataacaaagcccgtggtaactggtggtagaattactactcaaaactaggtttatctccaaatctcacgctttcagttatacaccttccaagcaagttactcaatctctttgggataggtttgctcatctgaaaccgggataataacagctgcctggcagcccctcaagggacaaatgcagagacctagagtagattctctacagattctaaacttattttactaagaagggggagttgaatgtgagttccttttgctgctgtttcctctctcaaccttgcctcacagtatggtatgaggccaggagtatcttcgcctctcaggtgaagccatgggagatcaggaggctaagtgaggaggtggaagtcagtgttcgcctcggaggcttttgacacaggacttttctatctcaaattaccgccaatagggagttgtgagttatctgtataaagaggtagaactagaagataaattactaagaagggtaagtcattcgcaatatctggtcaatcctgtctgtgaatgattataaaattttggattggtgaagtccatggtaatgaggtatacctgtatctagctgtcagattatgctaagacttttaaattatataatttctattcattgcagaataatttaaacagatgcaaaggacggccgggtgccgtggcttactcctgtaatcccagtactttgggaggctgaggcgggtggatcacgaggtcaggagatggagaccatcctggctaacacggtgaaaccccatctctactaaaaatacagaaaattagccaggcatggtggtgggcacctgtggtcccagctactcaggaggctgaggcaggagaatggcatgaacctgggaggcggagcttgcattgagccgagatcccgccactgcattccagcctggggggacagagcgagactctgtctcaaaaaaaaaaaaaaaaaaaaaaaaaaaaaatgcaaaggacaagggaccttttttgtcttaactgataattgacatcttcaattaggaagtatttaagttatgcaaaatacatattctgaaaataaaagaacaagaaataattaagccaagtttattgttatctgaatgtcaaattaaaagaaaaccaataaactggtcatttgaattacatgtaaatcgtttgtaagcccacatttgaaatttctatttcgtcattcacatgagtgggtagttcctccctgactcttaaacctacccttattctccattctctgatagagaagaagaagttagtgaggaagaactggatcacgtggcatccatcaggtcttcataaagaaggatgttatgatatctgggcaccagtgagaatataaggctaccaaggagtggacactttgtcaggtccctgtggcctaacttcactaggcacctgtgaacacacacaaacccacaacagaactatgcaaacagtgagtttcttgggttttgtgtgtttgggtatttcgtgttgatattcctaaactgacaattagtttcatgatccttcagaattacaaacaccccctaaagagcaaaagcaatcttagttttctaaagggctggtgagtaacaggctagggacaggagagaacgctggctttactgtagctgttatttctcagaaacaaggaaaatcagtttatcagttgatactgaccttaaatgagttcaggataagaaaatattactttttgtattattgtgatctattatatatatatatatgtgtatatatatatatatatatatatatatatatatatatatatacatacacatttagatatggtctttgtcctctttcttggaacactgctctgaaaacccttggaatctccaaactgatagtgtcttcttgcaggctaatgagatgcctggcagctggggcccaggatggcctcaggatggtggctggctgccagggaagccaattctgtgattaaataattggaactttctgtcccaccctcttcttcctgggaggggagatgaggtgaaggttgagttgctcaccaatggctaatgatgtaatcaattatggcaacctaatgaagctttgataaaaaacccaaaaggcagggtttgaagagcttctggttgctgaacactggtaggttccttgagggtggtgctctggaagagggcctggaagctctacacccctccccgctgccttgccccacacacctcttccagccggctgctcccctgtatcctctattgatacacaggcaagtgtatgtaaagtgtttccctgagttctgtgatccactctagtaaatgaattaaacctgaagaggtgggggctgggaacgctgatcagcagcactggtcccaacccagggcttgcacctagcacctgaagtgggaggcagtgctgtgggctgagcctcaccctatggggactgacgccgtctccaggtagacagtgtcagaattgaattgaattggagaacgcccagtcctcacgatcattgctcagttggtgtgtggggaaaaatttctcactcatctgatgtcagaagtgttgcgttgcgtgagacaagagagtaggaaaaacatttagtattttttttccttgtctttaagaattatcctggatgagtaagaatcccaagaaaatgccacttggtgtaaagatattttgtgcttataaaattaggaagagtaaagcgcggtgtgaatgagcaagagttttggattccaacaagccagggtcaggtcttcctaagatgtcagagtgcaatggcaaagtgggggccagggttcacaatctgtctccaaatcccagacagctctgtaatcttgcacaagttatgtatatccacttagccccagctccctgatgggtgagatggagatgctactactgccgtgaggaatacaagagctaatgtacatacatgatgtagtaccatgtctagtgcctacagttaacatttaataataactgtattattctgtaaatcagggtgatgatattggctatattttataaggctgtttcaaggtttcaaaaagacaatgcacaaaaaactgcttcccatggtgcctaaaacgtcatcaatgctcaatgaatgcgagcagtacattaaagatcagcagtacattaagatcagcgtgattaaagacagtgagcagaactcgccatactgaggtctgttcctgtttctctttcttagagacattgatgagttcagttctgtatctactaccacgtagcaatgaaacatttaggaaactgcataacttctggagtcctcagtttcctgagctatgaaatataaaaactatatgatcaaaggccctttcagctcttgaactgctggattctatgattcttccgttaaagttgtgaaagcgtgttaagagaggaagagaaacaccctgtactctcagaaacatttgcatatctaagccactaataaatgaagggtagtagatttggaaagctgtttataggctgttccaaaaaccaagcacccaatgtcaccctgagagatcactagggccgagcaaaggctgtgctctcctgctcgatgaagcttctatctgtgtatcctggtgtgcttgtttaccagctgtgacccactggtctaaaatggaaacaagaaatgcactgcctcggcggagtcttctggtccgcaggtttgtgaatggatgcagcacccacgcttaccctccacactctcacgatgtccacacagctacggtgacctattcatgtcttaggacgggtaggtggagggagcctgggatcaccaatgactgagaagcgaggcccggatcacgtaatccagatgttgctcctgaaatgcactcacgtgatctctcagaggaacgccatagaaaatctccttctaagagccgggcgcggtggctcacgcctgtaatcccagcactttgggaggccgaggcgggcggatctcgaggtcaggagatcgagaccatcctggctaacacggtgaaaccctctactaaaaaaaaaaaaaaaaaaaaaatacaaaaaattaaccaggtgtggtggcgggcacctgttgtcccagctactcgggaggctgaggcaggagaatggcgtgaacccaggaggcggagcttgtagtgagccgagatcaagccactgccctccagcctgggcgacagagtgagactccatctcaaaaacaaaaaacaaacaaacaaaaaagagaacatctccgtctaaatggtgtctttgatactgagcaggttaacaggctttaagtcaggagggtaacaattgaatatcagagttttcagatgtttctccaactaatgaatggtgataatgatgatccagtttaaagggtttaaactgtcataccgtgattctaatttcagatctgcctgtagctctgcggagatctctggacaattcgctctgtcactaagcctcactttttccatctgtgaaacggcggcggttgggctagggttagcagaactagatgacttctgagattcctcaaattctgattctaatcatgtattcatttaaagaaatcgatatctgagattgccactggtgccataagtctgtcatgtactatccagactcagatggcaatgccgactgaggaagaaggcagattgtcaaatgctatttggcagcccaggcttctagatacattgccgtcactatgattatcttgcaatatgagaggaccagacatccctgtggcatctttccttcctgccgtagttctcctcacactctactgtggactttttggaccctgtaacacgctctgttttacttcgccgcagggtcttcattcatgctgtgtttttgcctgaaaaatatttttccctcctttacccatctacttagcacctctacgctttgtaattaagaactcaaactgcatttaaccaccctaggcaaggttaagagctccttactctgagctcccatagcattatttttttctctcttcagagcatctaccatgatttattgtaatagcttatttagctgttggtcttccttactgtattatacattatgctggggaaggcagactgtctatcttgctcaccatttatctcaagcatttagcttattgcttagcacattgtattacattgcattgcactgtattgttgtattaccacgtataaataccagtgagtgaatgaatgcgggacagaagcctacactaccgtgtgttctactacattcagtatcattgtcgaggggcagctggggcatggtagaaagggccataggttaggattttataactctctggagtttactctgggcgcaggatgtggtgcagagtaaatcattaaatttctcttgatctctcaatttttgcatgaatagatttggataataaagtgcaatgaagtatgtcagtagggcatcgtaaatataattccaatgctggctatccacatatgtgtattagtgaagttgaagcaggaaaagctggattttgacacatatttgacatgcatctcacctcgagttatcctttgtctgctgttaagcttcatgcaccttctcatgtccatttactgaaggaatttctaagcactagccatccaagtgaataaaggctgctgtaagactgaagcacacgttatctaaagcaatggcccttctctaggaccaaagggatacaccaagtgctggagtgaagatataagacttcattccctataaatcacgctattccatgactacctattctaactgctcccaaagcacccctactttaacaacctcctctggtgtctaagaaccaaaccaacccactcttgggagaagacatacttacatggaaacaacaataataaaaaaattacctgaaatgctgtcctacattctcttcacatgaccaattcctattgtaaatttcactcatcatgaatgcctttctggaatcctccctcttcccccaaactgtcaggacctcatttaacactcttaaagcattctgccatgtgccattatatcgcttaattacagctgtgattaaataattattggtgtaattatttgtttgatgtctatttcccttgacagattaaaaactatataaggacaaggactgtgtgagacatgtttacccctagaatttccgcatctagtgcaatacctggcgtggaaaagatgttcaacaatgatttgctgaatggaagattatagaaccagacaagttttcagtattgagaggtttgagaacaagggtttcacatcacacataagaaaaggcacacttctcagctgtcttaatgccacaaaattaagttcgaaaatagaaatgcaagtgtgtagatatggcacacccatccaaagaaacccatggggcaaatactacccatttgagtttgcgagacaacctatcattcttcagagggaaggtgctaatagaatataaaacacttgatatttcagatatttgactttggatatgtctgctttcccaaccagatcagaattctgatagaggaacgttgcttactcagcttggtaaccacccggctcctaacacagtgcacagctacgagtagacttctatgaatggtgtgttgaacaaatgaatacatgggtggatgaatgaatgaataaactagagatatctaaaaaggcaactaaagaaatgagcccagactgtaaggcagaactcattcatccattaatgcccttgcatcaggtatgagaaaacataatgtatctgtttctaactgagtttcacctctatttattattaataaataacttccataatgaacatgacttttctcagaaacctgctagatattcaggaggaagcaactgttgtgatgagttgggaagaaaaaaatggcagctcacccaggagcaggtaggtgccttccaatttaatttaagtatgcatatttgcacgcacacacctctccgtacgtgctaccgcgacaatgcataaagtctctctcacggcatgtgcctgacagacgaagctggaactgggacgtgcctcatttggctgggctgtcactcactattttttcattacagaaaaatgaagtccatttccaagcgtctgggggatacacagtaattgggctctccaaagccttttcactgaatttgctcaagttgtgtttatttttttagagaattaggtgttaacagcggatggacagaacatcagaaaaatgaaggcaaatggacatgataataaagaaaatgatgtggtttttgcctgctcccctgcactatcccctctttctcccgccagcccctcccttctctctccctcttcccaggttgccccactgcagaattcagatccctttttctggtctgggttctttctctgatgaagttcccttcaaggtttttgttacaaaaacttatatgtatcatgtatttctttgactgaacctctttcctttttgagtggaaagctatggaaactgagctcaaagggacattttttctttgttcccttcctcatcccctgttccatcaaagttgaaatgaccacaaaatggctttagaggagctaaaggttccaacatacatggctatttttttttcttttggggtaaatgtgaaggtggaatgaagctcttttctaggggaaatgaacctggaccctaactcagaaagaccaggtctcaaattccacttaggtatgatctccggacatttttttaacttctctgaacttgctccttttttgagactacagaagattaaatgtagtgcctggtacagaggtgtgtgcggttagaatgttttgggtctcttgacacttattggtgccctctaggagcatttatctgtctcagatttttgaacattgccataatccctttactcccgtaagaggaaaggatttagctgaaaaacaaaaattaaaaaaatgtgcagagaagtctctctacaaactataaccacctagtaatagaaatgaaatgaggcatcattcaaaacagaggcttgcccactgcaactcagctttctaatcattcgtgattgatgagcctgccagaaggaatcaaatatttctgcaaattctgatgatttaatgtactcatttccctcaggttctgctttctggtgatggtttcctgggtcccagtgagtgaggtggtggacatttgttatttttagagcctctaattgagaccacagcacccagcacctaaaaatccactctttaagcataatagtctattgattacctcagttattgaaccctgggaagttctgaatcctctccctctcaaactgggaacaataaggcttcagagccttgcacctgtcagggatgggtttcctgcactacaataagacattgtcaatcagcagccttgagtccttggagatacccctcctcagacactgttgcatataagtcagaggaggggctttgaaaacttgaacacttccgaaggttctgtaactatgctttggcatcaacagtggaacatggtttcctagaagggagctgaggtacccagaggcccttccctaatagctggaattgtatatcttgtaccatgaggcatctggggccagggagtcatctggctttgtggcaacacagactgtgtggactaaatcatcgtgagcatcatcatttattataccatcaccattatcacaacacgcttttcacaatttttttaagtcttacaacaatcctaataaagtagacagttaaaccttcaagagtataagcatttgactcaaactcttcaagatagggagttaaagaatgcaaagttgaagccaagactgtctgcttctaagacctgcagtacaaataccataagttagtgtatatactcaaacaaagccatgaacgctgggctgtcagatggcaagcctagtgcatacagcctgatagcagattgaccgtgccagctgtcacttttacaatctccatcactctaagcagagcctttaaaggggtggggttacacctgcatagtgaggtggggggtcaggatccttcacctgctggaacctgagcatgaaagtacccacaccaccaccaatcacaacatcataatgaccaatcaatcaaccaaaccagcaaggacaacaacaaaagcaatttttcctgcccaccaccccgataggtgcacaaagtcctcctaatagtccgtgacagcctacacagctgggcatcatctaccgccctgcttcccatttcctctcagatctcatctcctgccactctcccactgcccctgaatcctagccacactgactactctgctgttcatcaaatacatcaagaatttcgtatgccctgcttccacttcctggaaagctctttccccatgcctggtcaacccctcaccttcctcaagtctttgctccattgtctcatcttccagaacgccgaccctcggcaccctattgaagttgtaacctactctgctcaccccgctgcactcttgatctcccttactctcttttactttctcacttgtccaaagcccttgtcatcttctaacagcctctgtgatttaccttctcactgtgactgttgttattgtctgtcctctgctagaacagaggctccatgattatatggctctgtgtctattatccattcgcttagaatagtgtttgaatgaatgaagggatttcccagcagctttcagaccccttgggacccaacctggccccctagctgttgagaggtaagagtgaactcatgacactgcaccctttgtatgggtttccatactctaaaattccacgtttgtatctgcgtcatgccgttaaaccacacatcaagcttttatgtctggtggtacctcaaaagctccaaacaattatgttgatgatactgggctggacaccttaaattctagtgctatattacaatgaaacatgggaaattgaaagtgtagaaagttgttctgcagccagacacctccagtagctgccgctatgatgtagagcaacaccatggacttttctgtgcctcaattttctcatctctcaagctgggttccttttatttttgaacccacacaccctgatgagttaagaaagaaaatgttctaaaacatgggcaatagagaggacatgatattcataatgagtttttttttttttttttttgccaaatgttgctcatcatgtttaaattctaaagaaaacgtcctagagtcaagcaaaaggatgaccttaatagagcaataataataacaataatgaataatttaaaagatcctttttcatacataacctcattgcataatgaacatctaatgtagaaagacatctctataggtaacagctaaagttaaaaatttggtcttttagagcagcattatttcaagtgtgactgtcctcagacaaaaacactaatgctctttagaaattaatgtagcaaatggaggggctttaataataacagttttgattttagagtttttaacagaagtataaaatttgacattctcatagctcctgtccttgtattctcactcctacacttaaaaaactccttactgactagttacatgagatgctaaaagttacaacattgcagttgctgatacaaatggtgttaactggaagtactaaagcattctaaatgtcttgcttatttctggtatactcttcagggggtttagacatgtttaatgtttaaatgccaagtcttactatcatgtttattgatcttataaaataagtaaataggatatgatacacttttggttaaaaattactgggtctcatttttacttcagtctttaaaacagtagcgtgtcactataatgtgataacatcatctttaagaaatagcagaatacttaagcctttcaaagtgattttgatttttagatcatcagatgtatgatgaaaatggttaaatgtttgtgatgtgagctctgtactcaatggcataacaatatttgtttttataatatacaatctttccttgaaataaaggatgaaacacttttcccttaaaataataataataattggtgggtaaaatatactataaagacataacattcccaattttaataataagattaaaaaaatcccccaaaggatcaaatgaactgttatttcagattatgaaggtttttttaaattcacattttcagatttattggctgaatttttgtcgatatctatctaacgtcatttatgatagaaaaagctttgaaaagcttaggctaaatttgtacactttatgtggtatgtgtgtatcaacacatgtacttattttaatgtaggtataattattactgaattgtggctttcaatgggaagctcactagggacagttaaatctgcctgcatttagctttcactgaaactctaaaattattttttcgtaatgttcaggttttgaaaaaaaggcgaactgttgtttgtctcaaatagtctttccataatttttcagactggtattttaaggcaaatttaatccatatagttcatactcatttacacttaaattatccaactagagcttttaacagctatttaatgtcccagacaccttttgagcttttaaagtgagctcctaaaagccttttccatctcattcatcctcctctcatcatcagtttaagagattgcattttgctcagagtaaacaaattgaatactgaaacttttggttatttttcctctcggtttatgacctctgaatgtaaagtggctttcagatgtgacctaactgattttcccatccctacgagccaatagagagtgtgtgtcacattacacttacttacgaacagctatatagccagcaaatgaggcaatctctgacccctcgttgggcacccagagcatataaatagataattacagaaactcaaacttctatgacatttttcatctgaaaatttccagggcttcctttagaatggcataagcatgcatcttagaacttgccatagtcacaaatatacctagttatatctctcaatatctccaccttttcacagatggcaaaggcttaagcagctgtaaaccagggaactggacgtccttccttccaggcttatggttctttgaattgcagaaaggtcacattttaagagagagagagagagtgtgtgtgtgtgagagagagagagagagaggaaggcctgataatttgagacttgcacaaacacccatctctttaaaatcgcgaggccactaatcacggggtttgaatttgatgaactctagtcattctttttaggaagaaaaggctttacagctgctgcttatgttgttgccacctattcttattcattccttgccctctcgggcagcagatatcatcttcctggatgtttgaaaggcacatcaaaagtcatttgcccaatttctcttcactgataccagttcgaatcccagtactcagtgtattccacgtcctattcccagggtcctctgcgacatgtttttatacctttagattggtgaaaagaaaactggaaaggcctggggaaacagtgaggtaaagcaaaaaattcctctggagggatgctcagagaaagcagaccttgttggcaggggcagaattgcatcagaacgtctactttgatgccccgagggagcagaacccaggtcacactgacctggcaggaggctgtacaagtgtgggaagggaaggccttccacctgcagtgtggccagccagcccctcccaccatgcacgagcagacccgctgttctgggtggctgcattttcctaataagactttgcacaagccgctaaatgaagctggctgcccgcttgagtacaatcccagccccatttcagtttacccatttcctcagaatgtaatctcacctcctcactattggattccttcagggccttgtaactgatgaatagaggccaccaggagggggtgggaggcaggtgggcaggcagtacagaaaccacagcacagcacactcagagggcgccttctaaaaagccacagaatgtgtgggtttcaaggtgcaaggggacctcagaaaacacgcagtgcagccctcatctgacttcggattcccgtatgtgattgccctgcctctgctgaagcatcctgtgtaatagggagctcaatacctctggggcaactttcttaggaagttctcctttgtttggagttgacatttacctcccagaaactgtgttttataaacccaaacagaaaattcctcctctgaatcacccagttatgaaagagaaatgagccattcttgcaatagaagcatttgatttgaaaaaaggtacctcttatgagccctttggatggtacgtattagacgaatttgttcaaaacaccttaaataaaagtgctaccagcccccaccctgatttctaccaacccaagagaatgaggcactcattcttcagctggttgtggtcacagaggtgctagttacataaatagctgtatctgccattgatcacctattttgtatattttatattcattatcttattccttacatttgtatggtaatttatatgtgtcactatttctaccttacagaagaggaaattaaggctcaattaaataatctacacaaggaaacaccttccctaagtgacagaactgggattcaaacttggaactatctaaatgcaaagactatggcttattaactatcatgtaataatgtgtacgtacattcatgcatatgaacaaatatatactcaaatatatacttaagcctttttattggggcatatgtatttatatgtaaatatatgtgctcatatgtatatttgtatgggtataaaggaaactatatatacaaatatatgtaatgtatttatagatatatattttacacataaataattatgtaaatatgaagattgccataaatactgggtgtggcctcactacagagctaagcaggacatgtggcttggcttggtttaacttgcagattgttgctaaagactaagttttccacccaagtcaactggctacacacatctgccctcttgggaagaactcagcccttttccttcagagagcaggtacagcctctcacctccaggtgagcagcccactcacactagaccccccatctctcttttttctggtcaaccttcagaagcctctcttggtcagacgtttctagctccctggtctgatgctccagtgccccccaaaacaaagcacccactggcacacccttgtttttgtaaattactcatcattctcacccgttcccatgggcagaattggggtcccagtgttttgttcccagccctggactctcaaggcctgaaggtttgcattcctgaagctcaccttctggtcttaggttttcacacacttctctaatgaaagcacagtggggcacccacggtgtgctcaggaggacatttcccataggattgcagcacccatgaaggtgaccagaggaatgaatctcctttgggtcacttccctctgccccacacgagagcccatggaggtgggtactcggctgcctgggccactgcctgtgcatttccttgcttggtgaagccctcttcagcccaattcaggggagatgagcaagatgggggacaaactgcaccgatctgctgggatttctggcagaggtttaagagtttttcattgctgggcagatttcattcaataccaggttcctgccaaagaagttttgctgaggccaggtgcagtggctagcacctgtaatcccagcactatgggatgccaagtctggaggattacttgagcccagggcagcctgggcagcatagggagaattcatctttacagaaaattttgaaaggttagcttggtgtggtggtgcatgcctgtggtcccagctacctgggaggctgagcggggaggatggttttagcccaggaagtggaggctgcaatgagctatgatcctgccactgcactccagcctgaacaacagagacataccctgtctcaaaaaaaaaaacccaagcaaacaaaaaaagaagtcttgctgaacctgcttcacgccggggttttgtgtaactagggtgggaatgccatgtgtatttttttttatgttttatttgattgctggttgagaataaatcatggagagttccaggcttggtgtaatccaaattggaatcaagttaagaagcagagctaaaaaccaatctaggagcacttttaatgttgactgggtctgtcaagttcccgagacaccaataacttactgtggagaggagaattacagtttgtgctgaaatacaaggtttgtcgatagaaaaggaatgagggcagtaaacgttaagtgatcgcctttagaaagccagggaagacttctttggttcgctaaaggagaaatgccctatagcatcttgtcatacaggaaagtcatatttggattttccaaaaagaagctgaggtatgtacaagaatttgagttactcaaaaacaaagacggtgaactagtgtcctcctgtgcatgtaagcttggactggttggtactggctgcatccagggtccacggcgaagagtagcccaattcattggtgatgtctgcagctggcatagaggggagacacagagacacacatgcaactgcctaccctactccagggattgcctggacacacggtgtgattaggattatcccattttactctggagctgctaagctctctggatggatttgatagagtgagaaccctgcaaagaggtctcagaggtctttggaattggcactcatctgacttcagaaattatacatggacccttactagaggcaggagaatgggctagtctctgtcataccaccgtaaaacctggtatccctgcaaagcacttgagcccataagcctataatcctttgttctccctggtgtgtttgctgaatttgtgcttgcttttattttgataccttagcatattgccttaaagtaagattaaggtgtgctctatattatgcgttttactccagacttcctgtgtctctgaccagctgccttgaccattatcatggatgggctctgggcaggttagtggcatgatacctatcttatatgcaagcatgactggggaagaaacacggcttctctcagttcacttctatatctagttttgcagtgccataagttagccagtgagtattctgtaggacttggctgatagccagaaatagtcttagggttcttgaagtcgtccacattttggtagcaacttcattacaatgtagtccaacagaacgttctgcaatggtggaatgttctgtaactgtcctttccaggacactagccaccacttacatgtagctattgatcacttggaatgtggctacagaaactgagaaactaaaatttttagttttgcctaatctagttaataaaataaaattaaataaccacctgtggcaagtggctaccatttagcaatgcttctcgaattttagcatggataagaatcatccggagggcttgttgaaacataatccatcccctgggtcccactgtcaggaattctgaatcaggtctgcagtgtgatgagaagacttgtatttctaacaagcctccaggcgctgctgctgctgcctgcccaaggacttcactttggggacccttgacagaggagcccagaatcatttaactcaggggttctcaagcggggacaactgtgccccctggaggacatttggcaatgcttggagaccttttttatgatcacagtttggggaggggggtgctacagacatctatttggtaggtcagcgatgctgctaatatcctataatgcacagaacccccttcccaaactgtgattgtaaagtataaaacttaaaatgccagtggcgctaagattgagaaactgctcactgctcatgccaaccagatcctggctgcagagatagttgcagtaacatcttttctatttaatgttaacctgtgtccttgacaggctgtgaccttattccctcaccaaatattataatatcattcattccttcaaccctaagactgttgaggaagcttcaacacccttcccattcagctgggaagttggacactggcagtggaggttggtacttgagtgtcttcccctggattctacattgggagcccaggcaggtgtgcaccagacaccaggtcctagtagagtgctgccagacaggagagggagtggcttccttatctggtctctgagaggaagagcacaaagaatgtctgatttttgcagaaacattagtcagcaggagctgtgctgcaggcattaacccaagaagtccattaggacaaaaaataaggagatgagggcacaggttctcatgccaaggttctgctattccacatgaaggccacccttgctttcccagggctctactgctgccagacagcagcctctgggagaggcagtgaacaggctctggagtcctggggagtcagaggtcagaggaggagaggtctcccttgaatgtccctttgccttgcagacctgaagccagcacatgcttcctcaaggaacgcaggcactttcagcctgcttgtggtagcaaatgctccgtgtttctggaggatgttcttacttcaggtcttaaaatcacaggtatgtatactgcctctaccaccactaaatgctcccccaaaagtctcagagagcaaagtctccctcacttcctccatttttctgccccctcttccattttcaagctctggactccaaaggagcttcgggagcctctaaatgcttaacagccccccgatctatagcccccggcttcgttcgagtccgtttggagaactgtttccttcaggtttctctgcttagccatggaagatccccaggcctcagtggtgcgtcactgactcgaaattggacggaactaatctcacggctgtatggcccttccattttttgtcggaaatgaaaatctaaaataattctgcaaccatcttcatggcctgaacccgctttccgtttttagatccccaaactattttgtaatgctcagaggccttcttgagtgcagctgctctctctttatatgacacagctaaagtctattagcacttttgagtctttggctggccataccccgtcaaccacccccttagcagcttgggacagagccggccaccgtgtgtgatggcacagtgacaaggtgattgctcacttgaggatagcacattctgtctgcagagtgacttggtcgaagcaggttggttcgtagggaaagctgggtcccctcagtctcatgctccctgatcatttctgcaacatcctaggcccctttctcaccttcacataacaactgcatgacctgagcaaagtcgcttggtctgagactcagtttcctctttcgtaacgtggagctaacactagctccctgagttgtttaaggtgtcaatttgatagcacttattcatgtgctggcacagtgcctcgtccatggtggggggtattcggaaacgctgaagctcttctgtggtgtccataccggtgaatcacaactcccacgtccaagacccgcccctgtgtgaaggtgcaaggcagtgtctctgaacaggaagtgaggggtgcacggggaggaggttgctgcattcacctctggattatcctgaggtgagaagggaattatgctgagcgagtgtgactgcagagaatgctgtatttgtacagaaggctatttttacactttggctaatgagttttgacctgtgtgaatttggtctcataattacacaactcagatttcctgttagccaatcagactgatgttgtgatctcagccatttcaacaattctcgattatcagagcagacaccaaggatcaggaaaaataactaatgttctcttcttctgaagatgtcttatgtgagcagaactggctttctggggtgacaaagctgaaggaagctttctcttcccatttgtcaatgccagctctagttcctcccagtgtataccctcccaagctcagggcagtaatcggacaggcttcagaatccccaaatctatgccctgtagtcactgtgtgcccagcaggaccagatgctcaaggatggctgctgggttgtggatgggcagggctgtagagaccagacagggaagaagatgcaaattcaggggcctgcagatgaccaggtcaccatgtgaaggtgagtggaagggcaccctaaagctgcagccatacaggccagctataaaggagaaaacagggagaggtttcagagatgcagggtggttgttcactcgccaggcaggaggtgaaagtggcttctccaaggcagtggtggcagaggttatgggggaaagtcaggcttggggtctgttttaaaggcaaagccaacaggacgagctgaggaaggggatgacacatgctgttcctgtggccgctcctcactgacgggctgcagcctggactggggagaccacatccactctagggacagacacacacctcgaagaagacagtctgagctacagtcatcaggctgtgtttgtttccagcacttaaggatataaacaccagcccagcaggttgtgggaagtggccatgggcttgaactcagcccgtccagctctgtctggcctctagcattataaattatgtagctgtcttcatctattattcagcataatttattttggacatttgcatcagcaatttatatacaaaataaaccagatgccaaaagagggaggagagaattaaaatggacatgcgtggaggtggggggagcaaaggggggccgagccggggactaagagccctgtcattaatcaaacacgggctctgcagtgacaggaggagacgaaagagcaggctgggaagcacttggaatgagaagaagtacccgattagccctccccaggtcccagccttgtgtacttgggacatttagatttcgcttgcagaatcccacatctcccacctccttagaactacaaccatgggtgcaagaagcagaatctaccaagacgtgggcagccctcaccccaaccagttcagccaaaagtgagggtgcctccctgggtggggacccagcaccaaaccacagtccttgaccccagaaggaagtgtctcaattacccaatgtccatttagtgaattcagtggcctaaccattgtctgtcttcaccgcccagtgcaatgatttcagatttggaaatggcttctaacaggagtctgctttgcacagaaaagtcctttacaaccagttctgggtactaatgaggagcaaaggagaggaacaggacagcacataggaaaagaaggacagagtattctttctggtcccaatcaactgtagcttttgggagaaacgactaagcaggtgccgtgttttgttttatttttcttgtttctttttcctgtccaaagcctctaatcctttcctctgccattcatatctggtagcagagaaaaaactggaggggaggaggaggcatagtcgggaaaaatatggggacgggggtcagaggcaagaaactgcaccaggggagcacttagagaaaggaaaccacattccagttgcggcagaatcaataaaagattttgttttgtgtttctgaaaccttcagggtatgattggaaacagttatgaagtacaagttttcctgtggcagaaagatgtttccattgttttgttttgtttgttttgtttcgttttgttttaaatgcatctctgccttaccttacttgcgggccagtgagctagcctaaaatcgaagctctgtgaagcccgctcttgccattttatttttgaaggctgtcccttggccacatctgacccaccagctcctgtcattagcatctgagtgttaagccagaggaactcaatctgggaacaccaccaacgtggccagtaagctgcaatttagttaatgtgcactccttgtaggccctggttttggcccgagtgtatttgggtagagtgtgtggtggtgatggtagggagctagagaggaaggggagggtgatggactcatttgcaagaactgcccagctgagataacatttaaaatgaacaggagaaggtccaatgctttgtaatcctccagcagctgctcattttgggttgggatcaggaaggagcactttgccattagtccccgagccaaaagtggccggtggtggtttctggtctccctaagccacctccaaaggggtcactcagctgtgtcctagggaagcgaaacaagagaaaaagaacaagatggcttgtacgctccatccatgtgtgtggccccagggatgcccctgcagatgggcctggttggagatggtgatatcttggatgggttcactgcagctccgtgcccgaaaagggcagctggtgggcttgttccgctgttcttcagcctgtcactgcaccactcttaacaagttatccacatcccagagatgcagattatgcctcagcttagagggccaagcttccctccaagagactgagcctgcaaaaagctgccagagtccctgtagcctgcccagatcctgcctgaacccagcccaaagagatggttgtcattccaggcaagggctcacccgggccagatgccttccttccccaggcctgtggtttctcccacttgaggaagaattgctatttcttttgctgtatcattacaaataaaacaaaactgactttgaacatattaatgataacagatggcttcataaaatgtaaacagagcaatgaaagtacaaatgggggtcctaccagtaattaacttttgatttatacagtcccaaggaatttggagctagtactgcctttctcaccattaggtggtaatcctctttccatcatcctcctaggcttggccttgttggcttttccatatctcttccctgaccctccatcccaagctcagaggtacctgcaagtttcacagcactgaagagtggaaatcaacgcttgcagtcatctctttggaatctgtcaataggctgcctcattatgacagccatgaagtacttgggggacatgaagtgctctgtaaatgtgtattattcttgctgtaattatgacacagtagtaataactcagctcgttggggcattttcacagtagctcatattctcttatttatttggcaatcaggcactttgctacttatggatggaaaatattctttggtgccaaggtcaggtcactggataaagccaacagagtagagagattctgatttctcagttcaccttgagttcagaaatattctcaaaatcatagtaacagaaaaccacagaattaattcagctctataggctcatggtctgagtagtgaatcttcttagatccaaacattggcacctctgcctaccagctgggcaaccctcggcccgtgacctgactgaccttccagcagctcgcttccctcatctttagaatgaaggtgctgatatcaaattccccaatgcgagtgctgtattaattaacacgggaaagtgcttgaaacagtgcctagctcataataggtgttcagtaagcgtagctgccatgactggccacaatcaccacaacagagctgaaagatgcctctagagatcatctagttctgtgtctgcatacacaaaacaaaacaaaagaaaaactgaggcctacagagagcccaggacttatccgcactcagtcaggtagttttgataaaggatttgtgttacctctgtgaggccagtataggaaaaagggccttaagttatggcaaactggatttagaactcttatgaagtttctagtcttaattaggaaaaggatggattaatgaaaagcaagatggaaacaacacgtagtaactatagtgattaacatttaagtgtttatgatagataccaaatattcttcaaacagcttcccatgcattacatcattcagtcttcaaacagccctatgaagcacgtattattaggaatgacattttatagatgagggaactgtacagagaggctaagttacctgcaccagttggcacagcaattaagtgacagagctgggatttgaaatttcctgtggtcactgcagagccctctatgagtgagataattaagcggggatatagactgactggatgtaccccaaattttcttccagtgctatgattccttcaacaaatattccctatgtctccacaccacctgaactccactccccctcctgccccttggcaggcactggagtagacttggaggacacagggttaacctcatttttggctcttgccctcatggagctataatctgtggttctaaaaatgccgtgattcgtatttatggttttggggggttaggggtgttccactccagccaggacagagcccccttctttttacccagtcaaatgctgatggttgtgatccaaagagcctactatgacaaactcctcccaacctctttcttgtatccctgaaggaattccatcccgacatggcggtcctcttcccttaattaactagacacttcctaaatgatgacctgaaggcatctcttcctgttcatggccagctcagagtggcaatggcaataatgtatctagattaatcacatgtgatattttaacatctaaattaaatggcaagcaagccccgaatccattaccttctctatcactactaaaatcaagctaatgggaccaattcaatttttctcttacagagggagcttcagagggcacaaaagccaataaagagcacagtaactctgtcctaggggagaggaggaggagctggataaacagtcaacatagcccagaggagcccaaaccagcgcagtttaacaacagcaaggaccacgtccacccagcaccctgagagagagtcccttggcacccactcatagacacatatagctcagtagactcttgtcatgagccagtctcactgggattgatagtgattccaaaatatatttcatttcatcaattccagttaaattattgcatctgaggaaaagaatttgcctcggctgatgtgccggtgtcagctcgaacctgtttcaaggagaccgtcgtgttaggggggggtgctgtcctcaccagccttcgcccctgcacaccctctgtgctgctgcctcagctgagtggataccaatggccccggagggatcctgtgaactccgaggatggcgcctgtgccccaggcatgggatccctgtttcaccccagccgcaccctgcaccggctcctcacgggcttctttggaggcacactacatcctggtaccatctaagcacataaatcagctgtcagctgtacacccaaatatctccattcttgtgattttgtcagatcatcaccactaataggatgttgaaattcataaatgtgtctattccagtaatagggcggtgtgctgccatctcccagtttgaaaagagagaggtttttgctgaggacacgaatcccacacgtctcaagagggcacctggctgacttgaattggggaggtgatttcctcctgggagaggctgctgagctctttaataccgaaactttaaatataccggtggctgtgaagcacagccagcaacctaagaattgctcagaaaatcacaggattttaaatcaaggaaagaaaaaaaaaggccgttccattctccccctcaggctggattccctgtttctttgtctggaaatgcagtggccctccagggtgaagggcatctgcagagcaaagccagacagcagccaggaggccacctgcctccccagagagtgccttttcatcgccaggagctgcagttacagtctcctaggggtcccagcaaagaagcattcgacttaatcgctaagatgccctgcggtgcaaacgctgggccctgtgaccacatgcaaaaggaagttgggtcaggctttggcccagagcgcgacatgaccagtgtccatttcctgagcagcagtggagtgccccgaccaagtctgggaacctggggactctgccctgagagctggggctgggttgatccaacttcttaggtgaggttttcatctttattgggagacctttgtccttgggatgggagatgtcccattcattaattattgtgctggctctgaataattgcggccagagactgctatgctgggcaatttccagttctaccgtggctgctgccgtgacactgtatacgtctttcactggtaccgcactgcattttacaagacatggtcccttcacccgctcagctgttccccataataacatgaggaggtgagcatagcaggtgttcacaccccggttttacagacagaaacagttggaaacctggaggccgaggttcataaaggttaaatgtggtgaaggtcacacagcatacataaacacttaacaaaacaggactagattcctagttttctgcttctaattccagttctttccgctatagctcatggaaacagaatctcagagagagttttcaaactcatccacagtcccttcagcaccttcgcgggccagccacaagccgaggtgcccgctggtgctcaacagcgccaaagcgtgtggcccctcccaggacgctgcgccctgccgggcctccccgtcctagagctctgcttcttgccacctgcccccgcttgggctgcccctcctactgctctcgctgccaggcagcttggggcctcccacgaatttatggaaggagattggctcctgcagagcccctcagcacgggcccaggaggcttcgcatgaaaaatgattgcaccgcacacgcggaggctgtttaaacctgtcactttaaaatatcccttctcctctgcccaagctgggccaagaggagcaggtccaggaaaaggaaatcagtttaaagtgacagcccttaatttctgaagccaaacctcagcatttgtggcagactttttatgtgctgaggtctcaatttaaaaccaaagtgtcccagtggcaccgcgtaattctcggtaagtttctgcaccttgtgctcaggccttcttatcagaaaaaatccaaaactaggaagaggcttcatattcatcttggagcaggcccagcacagaagcaggccagggcatgaaagggacagcaaaggccccccggagagccagctgggcctgtttaattgcttttcttttgttaaaagctgctgttaccaggttgcccggggcaaggacaggatgctcagcattcagttaaaatacatttcatgattggagggcagctctgaaccaaagcctggttatttcttaaatacggtagtcccccgctttaaccgtggtttggcatggtctgaaaatattatttggaaaatcctgaccagatcaattgtcttggtattgcagtgtttgtgttcaaataactcttatttgacttcgtaatggctcaaaacctgtcagtttgaatatgtcaaagagaagctgtaaagtacttcctttaagggaaaaggattttccttttcctgctaagatttttacccagaagcagaaaaatgaacaatttaaaggattaaaaaagaaaagggctcccaatgcatcccaccatgcattttccctcaccgttctcaaattaataggaagacaaaaaaaattgtatgctgaggttaccaagatctacagtaacaacaaatctgtgaaactgtaaagaaaaaaaagatgtacatagtatatgcaggatttggtaccgttggcagcttcaggcatcctctggggggcttggagtatattccctgagggtaagggggaactgctggacaagttttcagcatcccacaagaccgcactttgttttcacttcttccaggaagtcttcccagacctgtccaaagcctttactgtgcgcagttagtgcgtatttccctttcagttttattgtgtgtgtgtggatgtacatgtggcgtgaatacatcatttgttgtctaataagctctactgtatgcacgtattctcacttacgtgcccaaggcaatagcttgactctattagatatttcataaaaatgccctacttagatttttatccagaagcagaaaaatgatcaatttaaaggattaaaaaagaaaaagcttcccaatgcgtcccaccatgcatttctactcaccgtggtcttagagtttagttccaaggacacagttagctgcttggtgatacttgttgaatgaatgaagaactgaatacattttcgcatttgtgtggaaacaccactcgccaaattcagtggaaaggggaacactcatcttggctcatggtgtcatgaagcgtggtgatgctggtggggctcatgggcagaggtacaaatgctaagtgacagcctttcataagccctagattgtggcaaaggcattcaccctcccactcctatggtcaaggcgaggtgctggacagccagctgctgtcactcgtttctatttctgcctcccctttctcaactttcctgtagacccagaagggatgctgacctaaggaacaaaagcacaggccttgaaccctaactgaaacaagaggttttctctctagtcccccaccacacccaaactttcttagtttatgaagttattacttttaacaagaccttatctggcacttcgcattcctagaatgtttggtggccataactcagttaatcagtcgcacgcaataaaaggcatcataaaagtagatggcatgcagacagtggagcagcctcagcctggccaccccatcacagcacctcagggccagctggagcccatttcactgaggacaggcccattttcctgagctgtctactttcgcaaagtgccgcatttccatgttgcaggactctgctccagggctctgcagatctggcactagtatccccactgtttctgaaatgtggacaatctgagtgaagaaaagggagaagaaaagggaaggcaaatacttctgggagcctgtgattcagacaccggatctgccacctctcataaccagggagggtgtgcagggcgctttccacacatttgcaaacagatttaataataaggggctgtctgcctcaatgtgtcaaattccccgctagcagcacaagagaatatcaaggaaggaggcagaatgagaagcaatgcaaggtcatgagctctccctttgtctgttctaacatacgatatgattttccttcaaatggagatttcattgaagcataatcagccacctaaggagtagctgcggatgaaacatttgaggataaaaaattaagctccagcttggatacagcaagtgactctcctcttctaccgcttgatgagtaacaggcagtgtagcagcatggggaaaagaatggcccctgtaccccaaaacccaagatcaaatcccttcacatgtcataactgcttaaccttactgactttcaattcaaaaagagggggtgagagttggcagcacagggcagtctgcaccccacggtgttttaagattcctaggtgaagatgtcacgtcttgttggaaaaacatttcattgtaattttagggcagagctctcctgagatcccaagttgaaaatggcatcatctcccatctgtttttggcacctctcacagcacctagctcagtgttaagcacagcagatacctcccagcaacatgttgatgaacacaagcagtaattgagaccttaggctctgaagtcagacttgcagctcttcaccagctctgtgaccttgggcagtatgcataacctcctgagatgtggtttccttcatggggtgataactatacctacattacacatggattaaatgagaccacacatgtaaagaacatgcaaccagtaagccctccatgaagatgagctcttattgtcaaaggagaaggggcaaggaaagtaaggagaggggagggagaagcaggcagggagtggggaagtcagtagattaaaatggacacatgatgtaaaaggcttaggatcctacaaggaagggcaatggacacatgatgtaaaaggcttaggatcctacaaggaagggactccccagcctcctcaggaaggacgagggagaggaagagagatgaaacaaattcactgaaggctgctggatttactcagaactctgaacttttagttgccttgaacctcaccatatgcccccatagcagaaggcatgacccagacagaccaaaggctttgtgaacccagccccagtggctccccagatgtccttcagcaagagtgaatttctagtgtgggcagctccgtacttggttctcaaggaaaaaagataaaaactactctttgatgagaaaccatacggtgtggtagagaaagcgcagagtttagactgaggtctagttttaaattcctgaattactctgagtttctcaaagaggtaataaaatctcccagtttctgttccttcatcagaggtagaactatgtcatagctttattgtgaggcataagtgacatgaaagaacatggaaacaatgtgcaaagtgtgatgcattataaagtcatgacagttattaggacttggagtaaagtgaagagaatgtaaggttataaaagaagagattccaggtgtgaatctcatgtgaaattaaaagaaaaaaaaaaccacctcactcttcactttatcctgttatgtgacacagcacatgcacacacacatgcacacccacacaggctggtggtgagaagacattgtgacattgctttgatggatttacttatttacttattagattattttgagcatcacaacttcataaatgtttcaaataggagagaaaaagtgggggaaagaggaggggaaaagcgaccctcaccaaacaggtcggactgccaccaagtgaataaaattaccttctaatcaaatgcatcattaaaagtacagacattagatcccagtgctgacagctttatgagcaaagcatttgcagttaattagaatatactgcctttgtagttgggatggcatcaggggtgctgtttgactccagctaaataacacctgcttccactgtcatggaactgggtacctggacttttttggggggtgggtcttcctccagcttggttttgcagacatcagtgggcaatacttaacctgcaaatgctatcctggacatgtagcagctaagcttattcctaaaagatcaacagcaacctttgtgaaaatatatccagagaaactgaggaccaaaagaggggccgagtttccagactggggagaagatgcaactgcacctcccagctgctataccaccctttgtaggaaggatgttcagaggatcagaacgtgccatccccaaatatgccactttggcctattgattattttgagctgaaggaaactgggaaacatcagatgtgggaaggattctctgccatccccctttctgtctacgagcagggcataagagaaaggtgccctccctgtaccaggaagaggagaatgctcctgttactggggatggagagtcaatgccatggtaaattagtacaaacaacccaactaaaacacccttagtgcccattagtttctccatataattttgaaacaacccaactaaaacaccccttagtgctcattagtttatccatatagttttgagtcaaccccactttactactccttgttcaaatccctttatcctttgtcttgtcacatctccacattttatggctccttgttaaaatggtatataagtctcaagtctagccacttcattagggttttcacttcttcctatgaagcccctgcccgtaaaaatgtctaacctccaataaaatttgcatgcttttctcctgttaatctgtcttttgtcagcatcatccataggccttagccacagaatctcagaaagtagaggaaaggtctttccttctccacagatgagaactagaaggtccatggagcatcccccaccccctgcccagaccaattgaccagctccccactgacaagctccagagtaacaccaggcagccaatctctaacttgctcactgttccagctatgttagataatgtaacaattgcagagccaaacagctatctgcattaaccaggagattggagaagtcataaaatagatgttcccttatcaacaagacaatgggagtattgttataaagagagggattagaatagaattgttgactttttgtccatattgatggaaacttataattgcttcccaaatcctactcttccagatccatttttaaaattttgttttgttttctaaaaaaaaaagaaacaaaaagcaaaaccaaacaacaacaacaacaaaaaaaaaacacagtttttacttctttccatgaataaccaaacctctggtctctggaaatggccctaaaacctttttggaggattacttagaggcttcttctctctctaggcaggaccacagcagtcagtacaaacttggcctttttaaacctaaccaccattctaatgattcattacaaacatggaaagggaagcaggtcatccagtggaaagcaaggaaaggcgaatggccagggtcttgcagaggacttttcttggaaaggcctagactgggcacaggcctcctgatggcgcagctcagcactgtgtgtggccgtgactactcctcttgtattggcctcagagaatggccagagcagctagtcatctccctcctcatacatcattctatacatttgcagatagttattgaatcactcttcagccttcttctccaagttaaaccatgctagttctctagcctttcttcagtggtttcattctcctaactccataatcacctgcggatctctccaagccattttgaaatatctgatttgaaaagggagatgatgttatcttaaaagaggcaaagaagcattcaatcattgatagaaaagctcaggagtaatgatcaaagtccaggctcgtctctggccaagcctatttccatggtgcggatggtctgttggcatttcagaggtaccacacaaggaagatggtgtgttcctccctaatgccgtattaactgcggctgcagacatttgtagaggttgctgggtaattgaatgaccgacagcagtatcggagctgtgcaccgagataagggtaatcaaatttcatgcttcaggggctccgcggctttagctggccacctcaggggtcacagagaattcctttccccacccaaccacactatcttttcctacaaatagttctgcacaattggtcagttgcattttgtgcttttgtgttttcctctgaagagtcccccaaaggcaattcctggaggcaagtaaccctcagtaagagaccaacgtgggccagttagtcagataccccagagctctcaggaaaatgaatccttactgtttttcatccctctctcctaagaggcagttgattatttatgtaactctagtaccagatatttacatggggaccatggaatgagaacaaaggcagggaaataaaatacaagaaagggaaaagaggagaagggaagggaagaaaaaagcaactagaaaggaatcaaacatattcaactcaaacaacagcaaaacgaggaatgcttgtgtcagcaccagcacccaagctgctttacaagacatggcagaagtcagaacacattgcatgcagctgctgcctgtaagagctgcaagaggtaaagctgttaggaaactgaacgctggctcaacagaccccaaaaaattactccttgaggtcctaaaccacccgttagggaccccagaagagcttcctactgcagggatacctggattttctggtcaaggtcattcacagccattaactcagagctacaacaaatgggtggggagtcaggtatcagatctggattcagttaccagctcagacaagaagttgactgctctttgcctcaactgtgaaatgggagggttggacaagatttgcatgaaagcaccttctgattcgaatacaataccttccctgttatcagcaggggatagttccaagactcccagcggatgcttaaaactgagaatggtagtaaaacgttatatatactatgttttctcctatacatacatccctgtgataacgtttaatttttggattcggcacagtaaaagtttaacaacaactaatattaaaatagaacaatgatgaccatatgacagcatcactacttttgcaatttggggccattattaagaaaataagggtggcttgaacacatgcactgcgataatccccacagtcgatctggtaaccaaggcagctgctaattgacaccaggcaggcagcatagacagtgtggagatgctggacaaagggatgattcatgtctggggttagatggcacaggacggcacgaggtctcatcatgctacgtagaatcgcacaaaattttaaacttataaattgtttatttctggaatttttatttaatctttcaggccacaattgaccatgagtatcccaagtcacagaagccatggagaagggccaacgactgcagttagtattgtgggtgtaaaaagtaaagtagaggttccttttcaaagacttgtctccccgtctaattaggaataaatagtaacttctcttagaagcaaaatttattcaaagacctgtgctaacattcttaaatacctgctagccgtaataaagaaatcaatgtatgttatgttcttagctcccacaatttagcctaaatatttgccctggcatgcttataatggtccaagcaagcattaggtcatagcctgttcctcttccttatttaaaagtgtttttacctttctcagcattctacaagttacttcctccttcctttgttctcctctacttttgcctcttttgaaaagttctaagttgctagccagtcaggacaaatacagaatgtgaggtcccattccagctagtggaaaccggacatagcagtagggaggatgcgtcaggttataaatgaccctgtctcctttgttcaatgtactctcgtggcaaaactgctggtgagtgtacccttcctgcaggaagtaaaaatggccttactaaataaattaaatttatgttcaagtgctgtttctttacagcaccgaggaacaaacatttcaaacatggggaaggagtcctctgcctgagctgagctttaagaagtgctaaccaaaaagatgtttccagaagcgatcatttaatgatagggcagcccacatttccactcttgcttcttgtttcaaagtgagttaacgtgaaggaattcctgtagacaacatttagaaaggttgtgcttcagatgaaagcacccagaatttgtacaccctggggtggggggtggagcccacatgccccggctgctacagcatcttctcccatcacctgatcacttttctgtggacaaagcaagggttcagtgagcatttcttgagaagttagtgtgctctggttgccatgctgtgaacggttaagtgcagtgaggtattaccagggccaggactacagttaacacagtatgtgtgagttgagggagggaaacaactttctagatggagagaatggagtgaacaaaggggatgcaagaccttctgacacttttagaggaccaaatcattgcaagagggagggtgttaggctaaaggcagccaagagttatggagggtctaaactctttccttaaggcatagccaaagaggtaattgaagggatgaggggcttgcagaaataattccccttcatccttcctctcttcaaactatgtgaccctctaaagcctcctggtcctgggcacacatataagcatatatcagtgtgcaaacacagatcacacaggcattaaggctgaggaaattcatctaccaaccccactgccaaagcccagccaggtgcagagttggaactaggatgcgcctggtgccagaggaggatgggagagagccagggccctgaaatacaagctcatcctattcatatgataatagctactctttattgcgttattattacatgctagtcactgcactaagtgctttacaaaagtaatctcatttaattcttataaaactgtgacattgcggctagtagcattccttgattatagatggagagagtgaactcaaatggattaaatcatatgtccagtgtcatgcaagtagtatttctgaatcagtatcaattttaagtctgtcagactatagaccatatacttgaccctgtattaccctgtgctgtgagtgacagtcccggatagcaggaccaggcgttctgggctgtcttcctcaaaggcagtctggatctgtgctgctgtatacagagccactctccataggtggctgttgggcacttgcaatgcagctggtccatgctgagatgtactctatgtgtaaaacacacactgatttcaaaggcttggtacacaaagatgtaaaataagaaaagactatttactgataaatttatgttgattacttgttattacaattataatgtctcagctctattggcttaaataaattattcaaactaatttcactcatatctttctattttttaaaacgtgattctaggaaacttagaatcaccggtgtggctcacgtaagtgtatgcagtgcttctgctgacagcgttggcttggcttgtgctccagtgtcctacccacccacctgcaagtgcaggcttcttccctggtcatcagagcctcccgccctaagaagcctgaagtctcggagtcataaagcaatgtgacttctgtctccgagtcataaagcaatgtttccatttaagcccagactctcatcagaggctacccctcccagtccttcggggaaaaaaacgacagtattctgtgttcattagttaatatttgcaaagtgctttgaagatgaaatgcgctacataaatgctgataatagcccactgtacttctgtgggcctttcatctggagatttcaaagtccctaccacaggcagccattattgttctattactctaacgttaattgtgcatcattggagtgctggatcattatcgtcctcactccctggccctaggcagcctgggtggggacagagtagcaaccggtgaaaatggggagtgaagctctccttcatcccagccaggtcttcgtcaaagtcaactcagaagactgcagtcacaggtgtgcaggggaagggtgtctgtaagagggaccctgacaaagtgcactagataatactttctttgggaattacccgctaactttgcagggctttcatgaagctaggcacacaccaagtactcggtcagatgtcgctggttgactgagctgcttggtggagatgtctgacattcttttgccagccttggtggaggatgcaacaaccttggaaatgaacagtcttagctcttaaattaggtgttcagtccaatacagaccagaccttgcttggacccctaccattttctgtagtctacagttggctgagacaggggagtgacatttgatgctgggtttagtggagtagagagaaaaagcctgcaaaaatagaaaggggccttgggggagctgtgctccctgcagccagggcctcagccccagcctcaggtgcaaagtgcttcaggaatgtcacagcacaggccaacttagggcagcctctgcagcagacaccccacccgctgcctgccaagtgagaaagaccaaaaagtaaggttgcccaccaggtgcaaagccatggcgcggtgtgacatccccacggaggagaaactccttcgcgctaattacagccaccaggaagtcaggcagtgtgagatgacacagctggatttccccactgctcaggaagaactgctggagatgccagagaaagcgggagatggagagagctcaggaacacaaaagatcccaggaatgacaagcactccaccaccaggtaggggctgggtgtgtgtgctcgcaagcttttataaaaaggaataaaatgtgtcatttcagattggataagttgaacattactaattaagaaattacttaattatggagaagaaaataaaacgaaggtattttgccctagagggaaaaaaattttcgatttgccaaatcaaggaaatgatgagattccaattattcattaaataattgaaaatggctccaacaaaagcattagaatgtacgtgctgctcaggcctcccagggagctctgccttcctctcaaagcctctgtgttgtgtgcttcccttctgcaaataagtctcctctagaatggactgaatgaatactcccacacttggggcaaaaaaaaaaaaaaaaaaaaaaacagaggggcaaaaaaacagacttccctgccatctgtctcatgttaaggatatgtatccataatgttgtatttatcgtccctcaactatgcttaatttctgtccaccaaggctaagctttccccaagactcaattgctttcttcttcccacacatggctcttcaaagagtagattacaaatccttatctattgttcaccgcaccagacacccgtgttagagtgtgatgtctttgtccctcatctggctcacctggtcttcattccacatctcagatgtatccccatcatggaccacaacagctagcagccggcccaccaggcctcagaggcacaaaaccccaacactccaacattctttttcaaataacataaagaatgctcttttacatgtctttgtctaaacactgaccttgccccatgactttacttctatagagattactcctctttctctagctaaaccctgcctatattttcaatcgcctccatcataagtcaccttaaagtcaacacatccagtgttgttctcctcatcacctccttctccttaggcaacaaatatcacatcccaaatcgttagacttaatttcaaggaactagaaagtctctcaaatcttttattcctccaggttaaaaaacaaagtcagcacccgtgcatctttttacctttcctccatatccagtcggtcactaccctctgccaattctttctttaaagcaggctaccctatatttgtttagcttttagagcttccatccatttatcttactcgcccttaaagaaagttgaggaactaggcagagaaaacgcagcccttcctctttctctcgatgaataaagagatggaggctcatgcttaggtgcatgtctgacgtcatttactaggggcagtcttgacaccacctccctagggaagccctccctgaatcctgaagactagttttgtgtcctctttaactcttgtaacatccaatgcttcctccatcgttaacactcggttgttagatacatgagatcagtaactattttctatcacttccacattgctcaggagtgtgcatggaagaaaataagctcacactgaattattcccgaaaaatgaattcatgtacaaaaataaataaatgaaaccagattcctaagatccttcacacagctaggaaatggtagagccaaagctaagcactaagtttctttttccattgtgcacctaaatggtatccttggcatatgcttccagcatatggtcagattaattatgtaggcatgttttatcgtcatatatcatatcatttacaaagctcttcacttgtttccagttatgtaactgacaaaatctaaattccacaatatacctaactagccttcgctcacattttaaccctattaggaaattttatagttaaaagagatcataggtaatgtagttcaccttccctcctaatgtaaggattcctttggaggtacattttcccaagatccgaagggaagagcatttgcactccccgccgccatcaggaacacaccttcatctcccatggttcaccacccactgcgggccatcctcagaaccacagaactgcccactgccaacaacttccacgcttccacgcatgtatttttcaggcggttccctccttttccacccttcaaatcctgcctatcctaccgggctagcttgaggcccaccttcagaaggtccttccctggtatcccagctaaaaccatctaccaacatctttttctgcaatcttttagatctctttgtcttgcacacttagaatcaatcatttatttttacttgactctcataaatgtttatgacatatggcagctaaattgtaagaagtttgaatcctccccactccttgcattctcagaaaataaatcaccgaagatgtattgagcccctgtaagctagcccctgtgtgcagggtcccttcacacacattttgtacatgagtcacctgaagaagatttagagaatgatacgattaccacatcaccaggagaggaaaacggagcttcagagcggcaaagtgatattctaaagatgaaacaccgagttaagtgtctttggtgtggttttaatccaagtgccctgatttgcacacagggtatttgtagtaatctgctcgggctgctgaaacacagcacctcagacggtgtggcttaaatggcggcaatttattttctcacacttccagaggtaggagtctgagatccaggtatccatggggacaggttctcctgaggctgctctccttggcttgcacatggagaatgctatgtcctcatggggtctttctttgtgcaggtgcctcctggtgcctctccttgccctcataagggcaccagtcatactggattaaggcccaattgttatgatcatatttaattgtgtaattacctctttttaaaggtcctttctccaaatactgtcacattctgaggtactgaggatcaggacttaaacctatgaatgtgagaaaaggggaggggacagaactcagtccataacaggattcctgctgcactctctgcataactgctctgtgcctgagataaacactagccgagtgcagctgaggggctggctgttaattttggaaagggaatattatacatgtgcttgtgattgttttattttttggcagatcaaaagaaataaaaatacattttagaaaaaaatagtaaaaaatataagtcaaacaaaatcaggcagtacaatgaaaacaaatgttacaccgtggtctctgctttctgtctctgtttggtcttctctttccctggactgtctttgccggggaaatggggagctcatcgtgtgtttgctgcaggcaatttcttcaagcctggagagacctgtgaaactccagaatctactgaaacttgcaggagtccagaactcagggcaaacaagatattcttgagagcaactggtttctaacaccagttacaacgctgaaagaatatctagtgcagtactccaaacccagagggtactcaaaaaataggccaaatgaagtgcctggagtggggttcctgcagtgggacggagacagcctttcttggaaaggtgtaggctgggtttccaggtgagttaacagtgagtggagtgagctgatttgccattttcacctgcagttatttttgttgcaataaccagccaccaaataacttgatcccagggaggagaggtgagaaccatttattcttccaggtgcaacagagcaaggtgcagtgacttactgtaaatgtgttcacagcaaggtgagaaggcgctgcagaggggaccaggcatctgctttaagaaaatgagtaaagcagataatgttgagaggcagagaaagtcagagctgggcctctggaaagacagagaagccagccaaacacacggctccagtcctcagtgtcagtctttactttctttagggcactggaattttttgcaggggatctgggagtgggtgacatagcaagccatttgtttcagtttggattctcaaagaagcagacactgagatgaggatataaagacaaattgcttatttgcgaaataaaggacagcacagtcggaaaagcaactgctgcaagccaatgggacttcatcctatttggggacctcttggagccagggtagaacacactcctcagagttattgccctggaggtgggcgagggagctgcaatgtgtgcacaccaagtcctaaaggcatcgagggagctgctttgggagaggggtggacatgcatccagccccagtccttcctgcctgcctttcaggacagaggggctccaggggtgagaaggcagactccaccttggggcagaacatgcaagtgcagagagcaggaaattagaggatggggcaggtgcaatagcactgctagcccattagagcatgggggtgaggacacaggctttggcatcagactatccggcttggaatgccagctccaccattcaatagtgcagtgcccttagctgagttacttaatctttcacatttcaatgtcttcatctgtgaatagccaaaaacgacaaggcatggacatacctcgaagggctgaggtaggattgaaggagataaacccaaacactaagagcaatgctcttagtgtttgccaagcacccccaaaatgttagccattagtattgttaactactaatattatcaagaccaatgagttaacctaataaggtagcaaacagtgtgttcccgaacacacggggtatagaacaggtaagtcctggaatacacatggtctgggatatggtttggctctgtgttcccacctaaatctcatgtcgaattataatctccagcactggaggaggggcctcgtgggaggggaatggatcacagggcagatttcccccttgctgttctcaggatagtgagtgagttctcgtgagatctgacaatttaaatgtgtgtggaacttccccctttgctcactcactctctctctcctgctctcgccatatgaggactgtgcctgcttacacttcaccttctgccacaattgtaagtttcctgaggcctccccagccatgcctcctgtacagctgttgaagctgggagtcgattaaacttcatttcttcataaattacccagtctgaagtagttctttatagcagtgtgagaatggactaatacagcctgagaaggtctgaggggggagacatggtaccctgagatggcgatgcctgccaggcaacaggcagacaggcccctgctgcccaggaaatctgtgctgtggaggcagtccatgaggatgtgtggaatgttcccaaatgcccatcttcctcatgatttccctgggttgattctactgtgagtctgccattgtgtaaaaggtggacttcaaggaagttgcaatcaggtctcaagggtgcaccctcctctagttctttggggtgtggagccatatagcacaacgtgcagccttactctcagtcagttcccaaccacctgcactacaggggtcgttcaaagatagggatgcacaaattttggataattcaaaattatctgaattagagaattcagttctgtaaggaactgaaaagttctttacagttaacttttaggaacttttagacacagcagattgtcttagaccaatattaaaatgagtctctattcctttatcgcaaaccaactggcagttcaaggggccaggtcaaagccttctgaatggtgagagaagccatctgggaactgcttttgccgttgttgtagaatgaaacctcatgagcacccaaagcagccattaggtcccaggagagaacaagaatcctggaatgactgagttaaggccttcctgagactcgtgtgtcaaaatctccagcacaaccttcccatagctcaaggtggtagagcacccattcattctttcactccagataacttcagtatgttttaaagtcaagaagcttggtgagttataatagcaaagacttcgaaccaacccaaatgcccattaatgatagactggataaagaaaatgtggcacatatacaccatggaatactatgcagccataaaaaggagtgagttcatgttctttgcagggacatggataaagccggaaaccatctttctcagcaaactaacacaggaacagaaaaccaaacactggatgttctcattcataagtgggagttgaacaatgagaacacatggacacatggaggggaacatcacacactgggtcctatttgggggctgggggtcaaggggagggagagcattaggacaatgcatgtggggcttaaaacctagataatgggttgataggtgcagcaaccgccatggcacatgtatacctatgtaaaaaaccactttctgcacatgtatcccagaacttaaagtaaaatttaaaaaaaattaaaaagaagcttggtgggaaaggagcccacttgtttcatactggacattaaaatgaagagttcaaaactaattcaatgcacatttattatctcttactatataatggatgccaagtgtcttagacattgaggatatgtagtctgtaccctttaaactgttcacagtggagaggtagagaaacaaacagagttagagaacatcatgataaccattaaagcagaagtagagacagggttctatggaaaagcaaaggagagcatgtaacacatgttagtttggaagcctttcctgagttgataatgaatgaactaaattatgaagcaagagcagttttacaggtggcaagttgcagggggacagtattgggcacacctcagattgatgaaacagtctgtgcaggggaagggaagggtgagaatgcacactgtgtcagggcccataagtagcccagtgctgctgaaggtcagggagaggacagagggcagagacatccggggcaaactcaagctcaatgtggatgccatgaattcttctgcatttcttacaaaaagcactcagaaacttttcaacgttttttgagtaaggaactataaaattataattgtgttatagaaaatagattgataagtttggaaaccagcaaacaagttagaaaactattttccaagcaagaaattgtaatgatagtaccagtgggaatggtcagtagaagacaaattaaaacctattaggtgggtagaattggcagggttggtagtagcagcaataatgtgaagaacaagaatgagcagtggcttgcattgacttccaggtctcttgggctatgacattgctaattgtgccagtagccgaaacatgagctataagaagagactagaatgaaaatagagggagaagatgagatcagcttttgaagagatgaatttaaagtatccctgtctagaaaaagttggatatataatctaaagcttagaaaagactgaatacttgaaaccacagcaatgaacagactctataaacatatcacgaagaatgagaaaagagaagcaaaaataataccctgaaaaataatcacatatgaagggtgggctagtgagggaaactgaataggaaagcccagagaaggaaaagaaactctaggagaaataagggtgctacatttttcatgagagcatccagtgatccatgcattcaagttaacattaattatacacctactatatatcctaggaactagggttaaaatatttagcaaagatacacagtttctccctgtactgagtttacaatacaattggggagatgagtattcatcaaataattacataaatatacagtttttattgcaaataatgtcttaaagaataactgaagttttcttttttctttctttctttccttctttttctttctttctttctttctttctttctttctttctttctttcatctgtctttctttctttctttctttcttttttttttgaggctgagtctcactctattgcccaggctagagtgcagtggtgtgatctcagctcactgcaaccactgcctctcaggttcaagcaattctcatgcctcagcctccaagtagctgggactatccacatgagccaccatgcccaactaatttttgtatttttagtagagacggggtttcaccatgttggtcatgggccaggctggtctcaaacttctgacttcaggtgatcacccgctttggtctcccaaagtgctgggattataggcatgagccaccgcacccagcctcaaggtttaaagagaaaagagaaggaatagttgctaacattaatactagagagatgtaaattcagatgagtgccaggttgggaattgggagaccattttttattttaatggaagaaatatgaattagcaggcacataaagaagggaagctgccatggcttgaagggtgccaagaaaataaggaaatgcaaatcatgactgtagatcactcttttattcagtggattatgaagcaatggaaggagataagaccagcagcaaggaacgtacaattgtgtgaaattattgtaaagatgtaaagatttgagcatgccccttttttcaaagaaaatggccaaagaagtgattttgaaaatacaagagagcacatggacacattagtggagttaggtacctgtgggttagggcgtacctttgagcagaaggtgggacacctctttggctaaggtgggaaggaagacgcagagtagacaagaatgcagatagcctgctggtggtggtgggtaaacatttgaaaaaatttgtagctgatgatttttctctgtaaatctggggcaaggccatttgttaagaatataaggaatacataggaagcttgaacaagccataactttctagtgatatcagtctgtggtgttaaattgtttccctgcagctgtgctcagaatcctgatgtagaagaggctatgatggcgtggctgctcagcatgaggttctgcagggcacttgtggagaaaggacaaggtggtaggtaagtagtcctaagatggatggagaagttcactgatgctaagagaaaacgaacagacttggagaaaagggcataattaaagggctggagttgtggttgtggtgggagagcatgggccacagaaagagggaatggtggtgtcagagagtggaatttacagtcatagcattttcaagtattttcatgttccagtgtgtgatcaagagagtggactactgaggcgaagtgaaggtgaatgtctttggaattcaggagaaatcgtgagattaaagtgatctgtgtcatcccctcatatgttaatgtgtcttgcaaacatgtcaggatctcatgatccaacactctagagctgttgccggtataaaaccaatgtttcatttcagtttcttttgctgaactacctagaatctatgcaaccagtaacatgaaaggagtaagatttagtctggttttgtgttgctataaaggaatacctgagactgggggtaatttataaagaaaagaggtttcttgggctagggattctacaggctgtactaggagcacagggccagcatttgcttctggtagggcttaagggagcttccactcatggcagaaggcaaagcggattaggcatcccatggtgagagaggaagggaaagagagaaaggggaggaggtgccaggctcttttgaacgatcagttctggtgagaactaaaagagtgagaactcactcactaatgcaaggaggatgcaaagccatttatgagatatctgcccccatgacccaaatgcctccaaccaggccccacctccaacattgcggatcaaatttcaacttgaggtttggaggggacaaatatctgaaccatatcaaatagctactggcccctcccaactggacccttgaatcctctctgctccggagtgggcattttacgacagggttgagacaccaagacaaaggcggaggagagaaagctggtgatgccactacccatttctaatctatctgactgttgatatatttcaaacttcatctgccagagctgccaataaaacctccactgcctgtgaagatgtgattcgaagaagacagctcagtagcaattccatcagcattaagtggttctatagcactctagaatgtcacagcactttgtggctgtgattattaatttttccaaatacaatgctagaaggcagtccaacagcctgagcacatcttgtcagaagcacgatgaaaaaaaggcatagaaatggacgatgggagaagctagaccagggcttaagccaagaggaagcaacacaattcaggttactctccatgagcttgggaaattccatctaacaacccccagaaactcaacttgcctggtcagagacaatgaaggaaccaaccatgtcaccaaactcagcttaaagaatatcatcataaagtatagacacttttggtggataataggtactcaataacataacaaatacattaatgtaacttcaagccccccttggggaatataataagtatgtttagttttttgaaaaatttctttaggctttacacatataatatgttccctcttatgtatttctgttataatccaattagaaatgttacttgaggaattttataagagagtgaagctgtcaatgttttggacaattcctataattctatatcagccaaactatcaatccaggtgtgggtaaaataaatacactttcagccaaaaagaaatgaggaaggaagaaagaaggaaagaagaaggaaggaaggaaggaaagaaggaaggaaggaaggaattaaggaaggaaggaaagatggaaggaagggagggaagaatgaagaaagggaggaagggagggagagagggagggaagggagggagggagggaaggaaggaaggaaggaaggagggagggaaggaaggaagaaaattaaacaaaaaatattttagaaaatgcaatttaacatagtttattgtgacaatgagtgaagagagtaagacaaaaaatcatcttaatcttagctgtattagactgaaagaatacagtgtttaccaagaaccacattaggagacatttcctgaattagacttttccaaacttgtaaaatgggcacctaaagggagagaacaaaaaattttaagagcaaagaaagaactgtagttgatggctcttctttaatttaaactatgactatctttagcaatggacctctagaatttaaacagttgccagtcctgaaatgcctcccattccccttcacatttctgctgcacctgccagcacactgccacaccaagcaggaggaggaacagctttttgcaacacatctactggggctgaaggactccggcatgctgaggggagaagacgttcattagaaatcagagaagccttttcctttgagtaaaggacccgtggtcactcttagaactccatcatgtttatatagggaattccacattcatatgcttatggctaaaagattattggagaaatatattcctcatcaaaagtaggaaccttcaagggtactgaaaacatgtttcacgacagtgggctacaacagaagcctctttatagagactgttttagaccctctgaattcaaacgggagccattttatagaacagaaaaaaaggattatatggcaggactggggatagagcagtagccttagtgccccaagcaggcaggcatctagaaatgatgttgaaatggagccaatcgtgtagggcatagaactctagccaacaattattttctggaaataaaaacaatcgcaggttctctctgtcagatggaaaatggcagataaaggaaggagacttcaggggaagaactgccagcttggaacatttttcctttacccccttcaagtgtgtacaagaaccagatctagttttttgtttgtttgtgttctttttttgggggggggaggggacacggggtacagacctggaaaagttgtcttagaaggtttgtgtagaagaggaaacatgattgctgaaatcacaatttatcagaaaagtcagtatcaaagagtctgtcaaaatcctgtatctgagaacctaaatgcaccaggcattcgaaagtgctaagttcttggtcctttgagcctcctcaacatgaaggcagacatttccctgtcatcctagagtagtgaaatgcctcttggttgcccagagaggaagggtaggaaaagagagcaaaggctaatgctattaaaaggctaagatatttcaggcagtgcaaaatgctggggtaggtgagtcccatcctttgtctgagagattctacctagaaacgctggtctgatttcacagctgttgtgcaggagggcctccccccagagtcgacaggggagtgggcctttaggaaaagtgcagcctcaggcacggatatttccagagggataccaaaaaaaggctacccattaaaatctttgctgtagtaggaatttcatttttaaaataaattatattaggcaccagcaaggttaatctattaagacatcaggattaattcctaatggaaatttctaaaatacatacacacatacatacatattctttattaaaacaggagagacaagttagaccagaaatacgtacagcacaatctccagcaaatttctcataatatttaacattaacgtttcatccaggtaaggtatcatcttattatagggttgatgaagcttcgggtaaagtattctagggagtgcaaaatcacattttcctccccttataaagtgtatatttgttttattttcaaatttctgttgcttggcgttcttgtaaattaatctgtcacccatcagcaaccaaagtcacctgatcaggtgctgcagtgcttagctggagatgggaagcctctggaggtcccatttctgattaactctcttagttcagatggttcccagagtctcccgaagggttttcaattctggctattttcttctaggaatttcattaatattagctattgggctttgctccataaaacctccagtctagtttctgcctatttctctgtgctcccagttagagcatgacagccactcgggcttttttttctttttttcccttgaccctcattctgcttcccaagtaggggaaaaggtaggagggttatggtcaatttccccatgaagcacaactaaagaaacccagattatgtgaatcccaggttctactatagaaatagtcttcttcggccaggtacggtggctcatgcctgtaatcccagcactttgggaggccaaggcgggtggatcacaaggtcgagagttcgagaccagcctgaccaacatggtgaaaccccgtctctactaaaaatacaaaaattagctgggcgtggtggtgggcaccggtaatcccagctactcgggaggctgaggcaggagaaccacttgaaaccgggaggaagagctttcagtgagctgagagcatgccattgcactccagcctgggtgacagagtgagactctgtctcaaaaaaaaaaaaaaaaggaaagaaataatctttctcttttataaaggaattagcaggccttggaatcagagctgtgtagaaatgaccacgtgattaatgatgctaatgatgagtactcttttggggtcttcctgtgagtttcacatagtcagtgcaagtcacattttattttattttattttaagacagaatcttgctctgtcacccaggctggagtgcagtggtgcaaccttggctcactgcagactctgcctcccaggttcaagtgattctcttgccttagtctcccaagtaaccaggattacagacacgcaccaccatgcttggctaatttttgtatttttagtagagacagggtttcaccatgttggccaggctggtctcaaactcttgatctcaagtgatccacccacctcggcctcgtaaagtgctgggattatagcgtgagccaacacgcctggcttgcgagtcacattttaaatcttcataacaaataaaccttataagcagccttccacagccagtttaaaagtgctattatatcacttaaaatgaataagcaaataaacaaactagtaaaacaaagcaagaaaacaagacacaagcaagttaagtgcagggaagcattgttaaaggttagcataaagtttcttttttcctttttccctccttcccttcccttccattcccttcccttcccttcccttcccttcccttcccttcccttcccttcccttctcctgctccctccctcactccctcccttccttctttccttcctttcttccttccttcttgtttctgcaaacatatattagggaacattactctcaatctcctatggacaaaagtcacaaagatgagtgtgatgctggtcctatcttcaaagacatgcaattagtcaagagacagcagaacctcaattcactaagataaatgcaaatgttagaatcagggtattaaaaaattcaaaggggcatcaaaaaagggggtattcatttttactatgatcctcagggaatattcagagagcagatgacacttgaattgggctttgaatgatgacaaggacttaggctcccggggaaagggggaagcacattttgggcagcaggaaaggcgatgcagccccagaaagaactatgtgatgagagagagcagggcatgagtttcttccctgttcacacagctacagaacatgcatcccacaagagtactgccaatcatttatgtgaatagtcaggataaggtgacaaaagtagttttggatcagaaaacaaaggcatttgggtaccacaccaaggattttatcctttaagcactagtgcttcttcaacccgggaaggcaaaagatatgctctggaaagacagctttggcaggatggacttgatactgattccattatgatgactcaggccaaagaagatgaagatgaagtcaagagaccctgagcagacaagactgggaggaggagatggctatagcagatgtctttgtagactgcatttgaatttatgcctaaattgtgttggggcaaaggtgagaggagtcaaagataaatggacagctttaaacttgggcaattgtgtgtctgggaacagctggagagagtcaagtttgcaggggagtgcactggagatgtggtacccagaggggaacctgagaaacagtcatcctttcactactttgtcaggtagcaggggatcttcatgagaaacgttaaattaaatgtaggtttgacaagcccattaaatacaacactgagttcaaaaaaagggaagaatcgggcaaacagaccaaataagaggcaggaaagccaaattaacgctctaccttgattcaaagacatgctaggttttttaaatccaccattgtaataggatgtaatgaagatttaagctttaaatataacctaatacccactaattaggataataaaatacaaggagttgctgtgccatccgtacactaacataactcaactccctctgcacctttttttctcctcactctccggccctgaagccctcccagtgcctgcatgtgctggttaatagacaggaattaaagtgtgaagcacgaaactggggtataaaacacttaaatacgaatgtctccagtcctgctgtctggagagatttaatgatattttacagggaaggtcagggcatggcacacatagggaatattttaggttctgagtcttgctaggaagacacttccagtcgaggtgttatttgggtttatttggttttccttctttccccacttttgacctgagattggaaaaaaaaatccagcagctttaaaaaagaagataagcatgtctgactataccatcaaaaacaaaacattttgtatataaacaatttataacaaagccaaaagacaaataaaacatttttggattgggggattgcaaagaagaggccacacacaaaaatgaagaagaaaaacaaaactcttgcaaattaaaaagaggggattaataagcaaataaaaatttgcaaaggcctattctcagaacaaatacaaatggcaagctggtatatggaatcttgttcctattcaccagcagtgggaaatacaaactaaacagctctcccttcacactttactagataagcaggcacttttaaggcttaaaacccctatggctggcagtagaaaggatactttcaatgtatactttataaaaaatgagattattatacatgttttgtctgcatttttcttttcttctacaatgataccaatggaaatgtctccaagtttctggtataatttgcattcattctttttaaagactatttaatattccatgttgtatgtataacctaatttattctgtcattcacctactatttcgttcactatttttgctacaaaggcggctaaggctataataactttatcacaaatttgtactcttatttatatggattttgtttctatgggatggcttctaaagttttccaaagtttaggagtcctgaaggaactcgagcattgtaagtatttttagttttagcaggagttgccattgcagtgatgaagtatagtgaagaagggcaaggattgatgaacccaactgtttggagttcatctgggctttgccactcaccttgggcaggctatataaactctctgtgcttcagttttcttatgtgtaacattgggatataataataccttccttgtaggatattttacactgattaaatgagttaatctatgtaactaatgcacttatattaatgtgtttgtaattatatgttcataatgtgtatgtaatatagtaatgcctcattcatagtaaatgtaccataacctttgctatgattattccttagagaaaaaacactgtagactatgacaataatttattttataacctttattgtgtactatacacacttctagaagtatgtgggatgattttacgtgatatgtggtgggattattttaaagttattcatttattacaatttagtgtagactaagaggttctgtgttctttttcccatttacagctgtcaaaaaagttcctttaaaaatcaatgtatttaagtaaacacataaatagctttaaattagaaagtaataaaacataatgatatagattacataaaaatacagttaaaagtgtgcagtttgggagtgactggtattctgtattattatcatgcattgctttaattctccaaacatttattgtgaaaaattcctccaggtaaattctcttaactggtaactgaaccatgtgagttctatccagtggtgggctggtagaccagctctacagttaaaacaaaacaaaacaaaaaacaagaagaatgctccgatttacagtgtttgctgatttctatggggtaaacactactgccaggaccaatcttaggttaccaacaatttaattgtcttgcaaaattcctaaatatttagcaatcagctctttgcaccctacctcggtccactccagaacaccactgtcctacttaactgttaaagtaaagagttttgataactgaagtggacaaaaccaggtatgaaagaagcatttagaattcgtctcagtaagttgtatttctatctcaatgacctataatttcaaaactgtgcaagaaaaggttattcctgaataggagtccaagtgttgagaaatgagtgagagttcttaaattaaagggcaatactctgagaaaggcagccctgtgggatgattctcattttactgtgatttgaaacaaagtcatagtttcatagaacatgcctccctaataataggaatcacgctgcattacgatcggttgtttctgtacctgtatcacaagttgggttgtgtggctgcttcatccatagatgcctaggcctctctctgctcctgtggcccctggagcttatgctattaaagttcttacacactgagctacaatactgtgtccacatggctgagagcacctctcaactgagattagaactcaggtgtctaattctcagtgccctctcttccttttgttgcaacgtatcttgtctcctcagtgcccaaagaaggctgtataggtcccattctggcattgataacaatcttgttatgacttatgccaaccattcattcatcatccaataaacatttattgagcatctagtctatgccagatgccctattccttcctttttctcgccttccttgtctttctatcttttttttttttttaactttcctccaggagatcaacgtagctgaacaccttggagccaacttccagaaaatacaaagtcaagaccattaaatctatcgatgactggaaaaccttattggacttcagatttattctaagattgtatctgggggtgagttaagaagcggtggtagtcagctgctgagaatttcaggtggctcagcatgggcccatagcccttctcttctcttgctggcatgacaaaccacaaatagtgacatgtcctggaccttctccctggggtccccttgccttagcttatgcaggcaagtcactggcaccaagggcaaagatgaggatagcttgacattgcctgcatgccctagcccatgaacgacatccagttttggaaggccacacacaaagcagtcagtatagagtggcaaagatctttttatttctgtgaataggggatgtcaggagctaatgaacatattatcttggtaggaaagactggctctacaagctgagttttatggacaagcataatcttcaactctttgagaatgggtggcagggcataggtgaaggaagaagggaaggcttgccgatgagcacgtgacctacaggcacagtctctcttcatcaccttagggcgtggcaaggaatccattgtgactttgaacaagaaggtccaccagaggttatgatgattgagcttctacaggaggttttcctgagcatggaaatgtgggttcctttctttcattgccccacttagaggtcacagttgccagttgccttcctgagcgtttgccgagctgggtcactggggactgctgacaaagacttctgcaaaggcctcctggggcacaggtcactctgtcaccgtggccccctcccactcacacccatggttctggagatctaagtacccccagctacccccagcactgccaggagccctcacagcccagggggccccactccacccagcctgcccctgcctgcccagagatctccccagaggcttcttagaatgtttcctgggcatccgctctgcttttcaagaaaaaaactgcagtggaacagcagggcctggcaggctttggatttgaaatatggataatccatttgaaacctcaaggcccgggcagaaggaaactaaaaattaaattaaatcagaagcacaaaatctgtcttcctggctctgagacagcctcacctcagactttgaaagttagagtggataaaatcatagtcagaaattgttcaacctttcctacctcccccttcattttattggtaggagaattgaggtgcagtgacaggaaatgacttgttcacggttccagagacaggaaaaggaagagtgttgttttgtttttataaataaacattttcataagttaggatgagttctaactactcttcaagtgttaatacatttaattctcaattcaaatttatgggcttatattattaacctcatcattcaccttctctagtttctagaagtaaagactaaagcaaagaaaggtttagtatttgctgaaggccacagtttgtaactggctgagttaagatttgtaccccagcagtgaggttacaaagtgaatgcttttcacccctactaggccacccagaacagtatatttcttcttgtaaaactctgacattcaaagtcagtcctgtccttgaaatctgagatgtagaaacacaatgtgatgaaaatcccaagtatttccatctaagcacaaaagcctctatctatttggtaagaacaaattaattccctgaatctttgatgcaaaagtgagagaagaatagtaaaaacgaaattatactttttaaaaaattagaattacagtaaaaaatagaatgttaattatgaaacaaatcttatcttgctgagagaaaaccaagggcaaatgagggatacaatgagataaagaggacatcaatcaatgctctatgccctgggaacattttttgtatttactcattcaatagatatttactaagcaccttctatgtctaggcactactctcagatttgggaatacggtagtgaacataacagacaacgtccctgtcttcatagagtttccatttaaatgaaaagaaagacagacaataggcaaatagagaaatcaatctgaataaacaatatatgggcatcggtaacaaaccaagaaagggagatggggagttctgggattagggatacgattttatgtaataggtggatcagcaatgacccccaaaatatagtagtgagtcctgtggctctcgggggacagagtttcaggaagaggacagagcaattgcaaaggtccccagacatgctgggcaaatttgaagaaggtgggagccgtgcattggggccagtgagtggagggaaggaggtgagaagccgggggaggggatccagtagggctctggaggccatgctcaaggttctggctattactcaaaatgaggcagaaatgtaagagatgacatggtgtacatttggaaactggccactgtgttgagacctgactaaagagggtctgaggctgggaccagggggctattgcagaaatccaggcagggtggcttggattagagtgccaacagtataggtactgataaggacgtacagtcctcaaaggtgttgaaggtggagctctgggatttgcatctggactgaatgtggggtatgggagtgggagtggagatctaagatctaactttttttcaagaaaaaatctgcagtggaacagcaggacctggcaggctttggatttgaaatctggataatccatttgaaacctcaaggcccaggcagaaggaaactaaaaattaaattaaactaaaaattaaattaaatcagaagcacatcaggagtcgagaatgacagaaatttcagcctgagctgatggctagagccagatttcagttgccatgaccacatctggaatccacgtactctgcttcccccagctcacttgctttaagagtaaaaagacttactttcttccttgatgccttagtacatagatttttttttttctgaaatagactaagaagaaaagaagagaaacaaaaaaggtggaggacagaggcagaagacttcctggaacactaattttttgttctggcatctccgaagtgcagctccaggtgacctggctaccagctccatttggtttataaggtcagttcttttgtccatctgacttccttggcttaacaaaacaagtgctcagaaactatcttcttacttgtttttggatatcacatcaagtgctcaagctatatcacttgatatagtttcagattagaaccattgctaactgcacagaaagcttttgggtgtgggacccaggcctgagactacgtcacatccaaatatggccacctcttggatcttcgaataaggaaacttcctcttcattccttaagtgtccactttctgagctatgatctgattgacgggtcttgtagctctctcttcctttagagactggaatgtctgtcccccccatctttccagtcttgggttctaattcgaaacactttcagtggctccatgttaaacacaatcatgatctcttcacctctgctcagctggcatcagacgaaagagtggtgaggctggcacatggtctgcgtccggctctcttcactgctgctcagctggcatcagacgaaagagtggtgaggctggcacatggtctgcatccgtctctacctttggaagcgctttcaccctagtcctgtctctcagatgactctgggatgggtgggctctcaccatttttgttcgctgtcatatcctcggtgtataaaggaacagcgcatagtacatgcacagtaacacttggttgaaggaagagagggtggagaaagagagacggggaggagagggggagagagaagaaatacattattctgctctcctctacttcaattgccttcttctgtgagcggcaccctcagagtgtgcttctggctgagcggtggctctagtggaatgcagcgggcaggagcaatggctgtgcaggctaacccagtcattaggttaactcactgctctcagcctctgcctgcctttgagggttcggatgttcttgatctcatccgggcaccattgttcctgtcctgccctgccgtgggtggctccagctacctgacattaagcaaagggactttactactcttggcctgaattttctttctttttttgaaaaaataattacttttagttgacaaataaaaattatatacgcttttgatgtacggcatgatgttttgatatagtatacattgtggcacagctaaatcaggctcatgaacctatatgcattatctcacatatttgacgtttttgtgtgtggtgaaaacaatgcctccattttccataaaatctagttagtaataggattctccctttaaaaatctgttctccaggataaatgggcgaatgcattcagaatgcttagaaacattcctgggtgtaggatgcacccagtaaatattagctgtcattatcatgtaatgtgcggagcatgaggtgtttgtagtacagagaaaaagaggaatgaggaaaatggagagactggggcctaacaccatctaacaggcattcctttaactctcgccatgggatgggaaatcagatgttagatccattctgcagaggaaagtactgagactgggtgagttgtcattacacctaaaatcacacagcagtgagccggcagatggattcacacctgcatcaatggccagacacccttccactgtacctactgccttctttgccaacgctatgaatatcttgagccctctcgtgtggcttcctatccaggtctttctggcaagctctttgatgtacttccaggataccctgactgtggagtgggaatgacatatgcagagtattagagggtcattttggccaagggcagctgacggtggagtccccaggaagagcgtgcaggcttgcaggtggattggcccctaggagattccagcagcagaaagtggcgtgaggacactcactctactaccagtggggtgccagtggggcatcccgagatcagcgatgttcaggagaaatacctaaagagagctggggaagacaccctagacttctgggaataaaagatgagatgccccacttaaccttatcccaaaccaataatgcaagcagaagagtggtcatgcaaaagaaaatgcacagaatctgaaaacaagtgggtatggttggactgtggctcggacatttaccacttatgtgaccccgcacaaataacctaatttctttgaaccctcatttttttctctttaaaatgtagatgatcaaagacaatatcatctattggacgaactgtttgcggggactaaattaaacaatttatgtaaagaaacagacactcaaatacagtcatacatcatataatgatggctcagtgaacgacagactgaatatcaacagtggtcccataagattatatactgtatttttacctttcctatgtttagatacacaaatgcttaccattgtgttacagttgcctacagtgttcaatacagtcactgctgtacaggggtataacctaggagcactgtacagtgtgtaacctagcagcagtaggctctgccctacagcctaggtgtgtagtaggctgtaccttctaggtgtgtttaagtgtactctatggtgtttgcacagtgatgaaattgtccaacagtgcatttcttggaatgtatccccattgttaagcagtgtgtaactgtagttactatgcactgggtcctcacttgtttctcatgagaggcgtgtgttttgaatgaaacacccgccactaatggacaactggccaggggtgtgacacaaggacagaatgtgggtgtttagattctgctgaactgcgacagacagagccgctcaaaaagagaaaacaggagctagaaaaaaataacggcatacttcttttcattccccactccaaaaatctgccatgtatttttcagccttgctactttccaagctaaacgtggagttattttgtaaaagttctccaggctcagtttgggacccagggacaattcccattacacaggctgctgtctaagctcctgatgtcacgtttaaaatggaacagtgaaggaatattattttatcttttgttcttatctttctattttattctcccttcctggactctgaaaaacgattaaaaaatcccacagaaaataaatatattgatattgaaaaacagaaagaaaagtcaaccatttgagttgctgagagtggcaggtgcgtgaaatgtaaagtcagagaaacaagaagaataagaataaaggcaaggaccaaggcaagttaatacctgaaggaaaggaattcccaggggaagcactgatgctgcggaaaaatgactccttccaagtgacggagacaacatattgcaaattattacatgcaggacaggacgctgtggtttcaggaacaagagcatgttctcatctcctgggcctgatgaagctgacaaatacaatcaaagcctttctcagtgaattctcaagagggaagtgttcagaaggtgttgctgtcttacaagtgaggctaacttgagaacccccaaccatttccttgcacccagcacagacatgtgaactcctggtatggagggcccttctctaggtccttgtctgttctgcccaacagtcctatgcggtgaatgcacacttaccctcgagggaaccaggagtgaactaacatgctggtgtcaacgagaaatcagagcacatatggcaattttataagagcacttagaagcaagtgcaaacctcagattcctcaactttcaatcaactctataataatacctcctttacctaattcacagggctttcaacagagaaaaatacacacagcggtttttaataaaaaaaaaaagtacgtggttatacatctgtcatcaatatgtcataattaatcataaatagggcatagatcattaaataaactaagtactttcggagggagggttctaatatttgctgcacggaatagttaattatgtgttagagttcttctaccacctttacaggtttagtggttttgtctgcactagacataggagtgaggtaaagcttggagattttaaactgccagggtcctaccgagaggcctcgggtccttgatgactcgctgcgccgtgggaatggagtgggacagtgaaatggtgtgacacagggtaactttctggaggagagggacatagtccagttctgtgaccagctgccagagaggagtggagaggagagagagggacagttcccaagcgtcacatctccctgccgcttcatcctcctgaaaccactcatacttggactaacttggaggttcatagtgaggaagaagtggggtgggatggtgaatcaactagcaatgtctgactcagggtaacgggtgtggggacacagccacatagcaaagagtctgccatcataccaggttctgctctgcagggtctgatatattggcgttggctatccattgatcagctctgggtgaaatgtgtcttgaaagtctgatgggcatttctatctctgctactgcaacttcctgttttctgtccttctagagaatgcaacatcaggagagaggaatggatatttgctatcaatttctagggaaagaaacttaccattaattgtttctgacaagcgcttaagaacacaacgtccctgaaagcaagacaaagtgggatttgattatttttgaaacaagacggaagccagtgttggggctgtgtccccatcacagtggggttggctcagcatccctcctcccgtctgggagtgaagatgtgtctgaaggagtcaggctgagtaccacagacgctgccggcgctcctcccaggtgtcagatgatgactgagtaacagactctgaggaaacaggcactgggataaattgctgctgcagtcccacaaaaacagaaggggaaatgtgccggaagcaatcagggcttttgagaaacagtgagacttcatggcacatctctcagccaatcgtctcagatggctttgcaggcatcgggtaattagtcccaacaacttcactgtgaataaagtattaatagacctccgtttacaaaaggagaaggggatggagaaatgaggcacacaggccaagaatcaaaatagcaatttgatagcaacactaggaaaaaaaaagtcaagaaaatagacattaaatctcaagtcagggtaaccaatcccaagtctttaaaaacaaacaaacctgttttgttaaagaaatacacaaggcaatataagtctttatgcaagaaccaggacttagggaacgaactgaggtggcttccaatgcttccctccttcaaccccaccctagcacactttggctccatccagaaggaactttcaattatttgattaccccattctcctgctcattttcactccttcaaacttgctgtccctgtagctgggagccctcaccaacctccaagacccccaatctttcatgactcccacgtatccttttgagctccccttagacattccctcaaggatctccccctggtctctaagtctagattacatttgcttccagaatacacactgttcttgcccatcacaatcttcatcataccatgttgttgtcactgccatttggtatttcccactaaagtgtgtggtcaggaactcatgtctatcttgctcagtagttactcatcgggacttagaacactatctggcatgtattaggatctcaataaatatgtattgaatgactagttggagacaattcttgtcttaaggaagctttcaatctagtgggtaagataaatacatgaacacacagtccaagggaatgaggatgggttgagtataaagtatgagttaaagtagcaagctttaacattccaagccagaacaatgtggttaataccatggcatatgctattgctttcgattagaatcccatcctgatagatttttctgtgctggagagcttccccagcacagaataatggatgtgatgagatgtcctcagggcaggtgagatgtctacatggaagctaccttttaaatttaatctcagagacttgcctgtcaatctttggacagataaagatcttcaagatacatctcctatgttgtctatcttaaagcagaagtatgattcggcaccttgggcagataaatagttgtttgtttccctagagaggctgtttagtataacaggaaggactttgtaggcggtggaatgcaatgtgttggaaagagtgtacattttggaattaaaatgaccttggctccaatcccagctctgcaatttactcgcagtttgatttggaccaagttacagtgtctctgagcgtcacacttagtattgctacagagttgtacagattaacattatattacagacttgagcctcggtaatttttatcgatggtgtaaaatggaaatgattcaatttcccacctctgccacattctagccatgtgctcctgagcaagttttctgatcactccgagcctcagttttctcacttgtaagatgtagacaatcaaatcctccttgcatatctactgtgaagattaagtgaggtatgtatataaagttcttaatttggtacctgcatcataacaggcactcactgaatatattttcttgtctttttggtattaaatataatggaattttatcaaataattgttttgctgtgagccatggtagaatatgactgccttctgccttttaaattttaactccctgacatggtttttctgtgtccctacccaaatctcatctggaattgtagctctcacaattcccatgtgtcgtgggagggacccagtgggaggtaattgaatcatgtggatgggtctttcccgtgctgttctcgagatagtgaataagtctcatgagatctgatgattttataaagggcagttctcctgcacacgctctcttgcctgccaccatgtaagatgtgactttgctcctccttaccttctgcatggttgggaggcctccccagccatgtggaactgtgagtcaattaaacttcttttctttataaattatccagtctcgggtatgtctttatcagcagcatgagaacagactaatatactccttctctagttcatccagtaggtgcagttccttctgtgtgatctcagcctccccatccactgatgtaacaatggccctgactatgtttttccctttctctctttcctagccccagtcaagaatttctggcaacccctcaaggccagagtggacagccctggatattcagaccacatttcagggaacttcttacatcccactgacttttctgtcttgacattaatttagaaatccagtcaccaaacagttggataaaacatgtgtcatctcatgcaactgatagaacagtatcaccattcaagagctctgataaataactgaaagggacatttccataaacattcttattctgttcctaactgcaagaggatattaggttgttagcataaaatttgcctattcagctttctgagtctactttatgaggagaaaactgattttctttttagatacaaatatattaaagttcacaattaatttagataacaccatgtgagctgataataaaatgtctagcaattaaataatgaatgctaggaagccatagtcatcagagataatcagaatacacctttattttaatgatgtaaaatcagtgtgttttcatatgatttaattatagattgacaggaaaaagtgcaaaaccatagattaacaatttaaggtaatgcatacactagaaactgtttccaaaactgtgattagtactgagcaagttaaattcatcatcttataaaagagaatttatagatttcaaatataatagcttagcatgaatagagatagaagacctttgagtacgatatgagtagataatttttcctataacatagaatgaagtgaaactgctaagtaatgcacacatttctctgaaggcaggttttgcccatcatactgtttaggcttatagtagaaaacactggtcccgaggacttacatccattgtaaaatgcagacccaactatatcatgtttttgcacaattctaggggtacctctttgatgtgtgctccaggacagctggtggccctggatctaacaatattccacctgttcatagagacaataagatctacaggttcagatggggagtctgagatgcaacaaagactcttcaagttcttcaattaggaaagcctctttatgtctaagagtgatgctacacttctctgggaagaagggcatctctgagctctaaatgctttatgtatctggcattttaaataataccaccaaatatgggagccactgaattgatgaaatcacaaactggaaattccccgagagtgaaacaaacaaacaaacaaacttgggttctgacattctgcagaaagcaggtgtatatgactgaacagggagaagggactttcctcaaagaacctcagagccacaaggtgcttcttttcagaggaacatagaacagttactctggggatttcacggacaccttctcactcactgatctggtcacattctgtaccctagtaggcagcccagattttcacattgacatagactgaactttattactcatttattgacacagactgaactttattactcatgttttttctttttctggttgaaaaaatgatgaacactgtgaatttcacttaaagccacctgctacccatttcaggcaatggtaaaaactaacatcaacaggctagacaaagtagccatgggagctgaatttcattccagaaatggacaatatcgttaacatgcactaagagcagcaaaccatctctctaactagggaagcattatcgataagattacctttctgtaagagcaagaagaatatcccatcatttactgcagaagagagtattgtgcaaaggtttgggctaacctcagcacccctgtagttaaagatcttcatgataatgaaagaaatgaataaaaagaaaatgcttccaagaggtgtgattttatacattttattctcgtagctagataactatgagatataacttcaaaatacaagaaggcttaaataaaagatgatacttgggagctcctgcatgccgacattggaatctaattctcacattttagtctcctgtcctattcatgtggaggtgctaagaatgacagcaaagacaccaagaactgattacttgctactctgttaatttttatgtttaatttcaagttttgtgttgtgtttgtgttggattgattgattgattaatagaaaacagagagcaaacctattctctgggccccattcagcacactgtggagttcttgatacactgcaaaattcccagtgttttcttcatgtgtcctcactctataagctttagctagatgggaaattattctgctagggagctttaaaatatcacacagttgggacaaagaaaaaaaaaaccatctctttgttcatctggaaaatgagaaggctagacaaatgatccctctggtctcctccaagtcttaaattctctatttctctgatgcttggagacatataagggattgttttaggaaagaaatactaagtaccaatgacattttttggcttccatttaaaatagatatcaaatacctgtttatgctttcagatgtgtgcattcccatagcaatttcttgttcaattcaacatggaggtacactggctgacagagtggaaacactgtaaacaggtggttttcgtggtttatattttaacactgaaaggactcaaagaacctcagacagccaggaataggagaaaatatttccctccaattaaattgttcctatatatcctaacatgcttgcgacacgtgtgactcattccaagtccagaatcgtaggtatgagacagtgaaaaggacactctgcttccacctgatatagtctctgctgtgctaccaagtttacagaagaagtatacaaggcccagagagattcacagggacgttagcctgaggaagctgttgattaaaatcaaggctactgtgtcctcgttaaggtctgtgtataggattctgaattgctccttgaagtaaatgcaccaattcgacatttatgctgaggctgatgaggaaggttacgctgatctaacacagtaagacatcagactttgtggccaggaatgcctggattcatcatttacttgatgtgtgacttctaatgagttgtataccctttgtgcgtctaaattccctactctataaaataagagggtgataatgcctacctcaaaacatttttatagagattaaaaagggtaacatacataaagtatctcaatatcccagaacctggcccagagtaaacatccacaaaataatcatcctctcttgccattttcaaagtgttaagggataaagcacacacacaaagcactcttcttcagttctcaccagctggatctttgcctgacattgatagatgttgtctgaatctaaactgaaaacatgaaggtagatgggccttaaacacattaaggatcaacaatttcagtagaattaaatggtaggaagagaggatatcatcatagccatcaataataatgatactaattagcttccatttaacaagcacttactgtgtgtgtggcactatgataaacacatgcattgtttcactgaacacatacaacactaagaaatagctagagttgttcctcccattttactgaggaaggagctaaagcttagaaactgattggtagaaccaatattctcacccctatgcaatatcaccagtctatgacagtgcttcaaaaactactacaaatataaaattgccaccagaagtatgccagcataaaattgcacagataggcagcattgaatccaaaatgactttctcattcatttgtttgtgcactgatttattgtacaaaattcgatgagcacttagtatgcactcggcaggatgctcaatccaagggttataaagataatcacatatagtccctgcatctgtgatgctcagagtctaacacacagatgcaaactaattaaaatgatgcaacatagttggggtggacacccactcactgccctttctgtccacaccactgcaggtatgcctcttggtgcaagctctctgagcacagggacaattcctgaaggaaaggagtgcttcagatgcagtaaccacctgcacacaacagtatccaatgcagagattagccccttacaagaggctcatgtttcttagcccttatactgcttgctgtgatagttagggttagtaataaattgaaagttgaagtggtctttatttaagcagttgtaggatatttggactaaaaaaaaaaaaaaaaagaaaactgaaagataaatgcaattttcttgtagaacaagaaaaaaatctaacagcccagaatatcatgcaaattgcagttatttattatcagacagtgctgtacagcattattgactaaataaaatgcactgcaataagacccacaaagcactatattatgaggcatatatcaggatgcagattttttcatatacagaacaccacctcgaaacagtattccctgtcagggagttatatttctatctctgagcaggcctgaaccctgtgtcccttctggccacgtgaaagccatgctccttcccctctgggccggcccggggacgctcggggcagggtatgaggcaagagaaagggacccaagaaaggggcaggaggaggtggattgagggtggtggacaaggcaggcctgcacatgcaccattgtgtgctgagaatacatctttcttattttaccaaactcacaaatacatatcaatttgttcccttcctcagcttcaatgcatttcttgttaaggaacatctctttgagaagaaagcctctgacagaatatccaagcacaaaggaatgatccagacccggagaagccaagtttctacgaagtgaggagtcagcagggggcagaagaaatgttattgctttcactccttgttggaaaattacgggccttcttttaaatcaaaatttctctttgctctcaataagatgacagtctagaacacttgacctgctgctgagagagtgacttcttgctgggtttagattactcaagagctctgcatttaatctcggaaggctgccaggggtttcaaggagagctggcagagcaccagatagcagccacccactgaaagtggatgtccctccctaggacgcacgactatcctatttcatttattctagctggggtcaaaggacacattcaaaccagcaccttctcttaggcacctgagtgaaccagagggatggggaggggttatgagggaagaaaatgtcctaggagcaaggtgggaagtgtaccaggcctctggactgcaaaagcgacccctgtgagccagcagggtgcacacccaagagccagtgaggtgctgggggccgggaatcagctcccatggcacccaccaaaccacacttccaagtcctgcggcatcctgaggagctgaggaactgaccccacagccctcaacaagttcccaccatctcattaagcctctccatgaaaggtcaagattgtaatagtctgggcccattatgttctttctctcgcagaaccaaagttcaggagacagaagctttttttttcttttggcaaaaactatgttttaaaattaatcagtaaaaattcttcctggattttcagtagtccctcaagggatctgctaagccagaagctgaagagagatggcctcttccttccgcaggaagaaggagccctcttggagccctctttcctaaaatgggggccacttcctatccagagggccctcagtcttggcaatggttgactgctttaagagggaattgtcgcattgcaagccaatgtccgtcattatcaatggaatctttcaatcaggaaaaatctcacgagtgtgaggaattggaagaccatgggtgacatctgcagtgtgcataagtttaattattactactttgaaattcgtgtgttagacctttcaaaagcacacaataacatcatgatataatttttactattatacatgtaatatacaaatatataaacatatttgcacacatacatatatttatctatctagttctatctatatctatatctgtattcagcactaaggcgagtacacacctgtttgttcaaatgctgtcatccccacagccaaagtcttaactggtgctagttcccagaatcatttattcacatgttcattactgagcacttgtcatgggttgaattgtgtcctctcatcctcccagaaaagctgtgttgaagtcctattacctggtccctcataccatgaactgatttggctatagagtcttggcagatgtgattagttcctgtgcggtcatactggaatagggtgggccattaatccaatatggctcgtaagaaaaggagaaaagacacagagacagagacgtgtgagggaagaaggtcctgggacaacagaggcagggactgaagtgctgagcccacaagccaatgaacaccaggattttcagtgaaacaccagacatgggaagagtcaaagaggggttctcccctgtaggtttctgaggcagcatggccctgccagtgccctggttttgaacctacagcctctggccctgtgaaacaatcacctcgaagttccctggttgtggtactttgttatgggagccctgggaaaccggcacagcccctcggtgctgggcttggggagggtgcgtgactaaagtgactgccccaacttccaggagcacagggtccagttgaccctacggccaggcggcctctatgttaccatcccatcttcagtcacgagcttttacaaagaattaattagtcaagtttaactgagttctcccttggaatttctccttcaaatgctgtagaagacaaagagacagagagataaacgcaaagtacagttcagctggaaagctcgagacctgccgtttctcaggaatcccgggtgtcgtttatattaatttgcctttgggacttttagattttgtcttttaagtggatgtctcttatccttagggttagagtgacagctatgattttagatgaacatttttgggtctggccacaattaacaattaaattgatttactgacaagcacccttcagtttcctggtgagtttgcttggcagaatcccagcaaagggggtgggaggctgggtaaatattgggtaaattggatcaattgtccacagcctacctgggttgagccaactggaagatcctttttttctcaaaaaaatatgtatttcctgcataacctagatatcttgtaacagaaattctcagactttcggggtttatagatcagtaaaatttaaaagaaaagaaagggcagaagttaggtgccaatttttttttattttgccaagtaacagtgtctacttcttctcatcattaattcttaaaaactaagggtgcattttaattccatagagagagaggatataatttcagaaaggacagttgttgacatgatggctccctctggctttgttctcccaattgttttcattcctcacaggcgtgggacttcatcatgggccagcatcatcatgggtcagcattttgaaaccactgacctagagaatgttaacactgtccatcttgctttgcctctacaaatacagacatgagctctagcccccaccagagaatgacaagttgagattaatatgccacagttgaaaatattaacctctctctgctggacactaagagcacagaagctgcagatctatttattcaccactgtgtccctagcacccagaaaggcgcctggcacatggatattcaatagacatttgttcaggagtggacagagggcattatatgagtaattgttggagctgctaccatctccttccttgactcaaacctgtgtcattacaccactcaaactcttatcttttttatcctcacatattttatgctgtctcctcctgctcctcatcaatgactgaatgtattcattcaatgttgaagttgtccacatccccactaagggtaatgacaaagaaaacaaaaaaagagagatggttagaaaatgaatcgtggccagagacccaaaaataaattaatccctagattcagtataaaaaatgacttcccagaaatcagcaacaatttggggatatacaaaccatggaaaatatgtctttcttttgcaggaaatattttttattagtggcaaagagggaaaatgagggaaagatagaatcgctgggtttctttgtttctttcttctttataaagaaaaatttagacctaagcatatttacaggtagaagtaaggaatcgtggaagagattgaagatttacaagtgggaaagaacagagaacctgaaagagctggacgagccaagagcaagggagaaaaggaagaggggccaagtggggaggttcttcagacttcactctcaggagtaggcagtggggtcaactctcagcaggaaggatagagggtgaggtttgcaacagccatgcacacaatgcaggagggagcaaaacctacccagatatggcgatatgatttggagcatacttgttaataaaatgtcggtgctccatatacatccaaaagcgtaatattgaaaaacagattctgaccttggcagctctgacatgctgtacaaataaaatgaaaaatgtgaaattattttgaaatctaatgatcaaatctagagaccttttcttatattccatttttctcgatctctctggagtatctgaaactgttggtcatcttcttcttgaaatgcacttctcccatgatgccaattctattagaccacccgagtttgtttttataacttctatgacagttctttttctttatccaacccttccccaacgactttgccccaattattttactcttacttaagatctttgaaagacttcatccatttcaatggcctcacttatttcttctgtgcagaagacttacaaatgtttctgaaatttcagacatagttccaatagtttatagatggataaatacagatatagatgtcctgtcggtatttcaaatgtatcgactcttttacgttagccacaaacatattctacttccttgcatccttaattttgtttactgcaacatgctcagaatcctcccctccctctccaggctcagctactcaggagacgaagacttactcatcccagactcctttctgtccttgagtcactccttacttccaaatatgtgtcacgtccagccatctacttttagcccacgactagtcccctaactcagacagcacagatgcagtcaatttgcctccctgttctgaagttcttgttttcttaacaatttggttttcggggaagaaagaaaatgtgccaattggttaacatgagtcattgagagtcaaacattttatagaaaataaaactcattccttcaggtgtaaaaaaaaaacacccacaaaacaaacattttaggcatctatgcattcattaatttatacattagtttaggcatttgggtttcttccagacgaagttaaaatctcatgcagaaaaagtgctgcaacaccactgttgctgttgggccatctgagcctggacaatggcctcttccacttccagatcattcacctttaagtcacctttaagttacgcgaggccaggtgagcaggaaagacaactgaatgattccttatcatatgtattcctttcagatccagtacatgtatccagtgtatatatacatatacatatatgtgtgtgtatatatgtatgtgtgtgtatatatatgtgtattacagaccttgacaataacaggtgcttaaatatatatatatgtataatatacatataatgtatgtaacataagtactttgctcatctcgtcagaaaccccataagataggcattattgtccccgttttgtaggggaggaaaatgagactaggagacacggagtaactagttgcccaaggtcactctgctaggacatggcagaggcaggattgaagcatatatccttgctccaggttaatggctatttctggaatgcctcagcagcccttttaaattctgtggtctgtaagtgagattctatcagcactggaattctgaaagtgagccggggacaccttggtctggatatccgttgtcccactgtagcgtatgttcagcctccaccatgacgggctcttttaagcctgcttgaatatcaggcttggatctcttggcatgggaagcacccaaatgccacaactacagagagtgacaccatgagtactgatttctgtcttcagctccctatgaaaaccagcccaaagacagctggaaatgaagaaaatgtgcaatgatgagggttttggggttttctttttcttttttagggggggttattgtttggttttgctttccctcaaaaagcttaaggttctttataaatctctttctttacagatacatgagaatgaaaagtaatatcaatgaaaggataattctataaatacgtggggccagtggcatttgatgcacctttctcactgtcagcttggactcattcttctctcattacgttcttatgagggaatctctgcttacttatttgtgtgtctatggttgggggagtgggaagtgagagggcatatataagaggaggagattgagatgagaggctatactactagatgtgtgagtttcatactgcagatagtagaaagcccaattttagctaaagattcaagctatattctctaatttaatacaagtagcaacaaacctcatctttttatttgtttgattaaaaaaaaaatctgtcagccacctactcaattgattccagattcagtgttgaggaataaaatggtatggttaatggtcctacctcaactctcatagaaattccatgaagtctataaagtctatattatctccattttacagatgagaaaactgagacttccagactttaagtaacttgaccactttcatgcgcctaatcaagaggagaagaggaattacatcccgagcatgttcaactccaaagcctgtgcaatcacccgctggattaacaaatgctagcgcttaaacctgggtgatttcacagaatcagggtcttgttctccagaccttgccactagtagtccacggctaataggaagaactgacaatagaacctcgctgtttccaaacctgggctttcagtcatttgacagtaaataagtaagcagcaatctcccctccttgaatgcattcacacagataattttacatgtcaccaatctccccatctcacaaatcgtcatcatgttgtggttaaatgatccccggtgctctgatcctctcagaataggtcatttctttttcaggtctttattcatgctacaaaatgcctgatgctgctctctgaaagcacagaggtatggccagggttcagtgctatgagcctcccaagcaaccatgggcagcttagcacaaatggacctacaatccaacattaatttcctgtcttccagtctgaacactcctgataagcagccgtctggctaaagaccgtaggcagaatcagtctctggtcttagcaaactcactactttgttcccctctgccagagttccctgcagctgcagttgcccagagctaaggacacctctcagagcagttttcagacacggccccttcctctcaccacctccaccccatgcccggctgctgctggtgtctctaccagcctggccatccacctcttcagagaatctcaatgcattattgaaatatgtcttcccacagcaggcagagaaatgaaaatttctcttatttcaattatttccctttcttaagcagagaaataaaaaaaactctacccataaagaataaaaaaggaatccaaattatttttaaatttatttttctctcaagatttagtagatagtggtgtaaatactggtgcaggagttaattggttatttgtgaggaaataatgatagaggcaatacatgtgcctctcttcttcagccactcccccagccctcaatccagataaaaataagagcaggactaacaggatgagaagtagatttggacagggaagaagtatttattgaacctaaacagttgcattgtgtatgagcattgggagtgcagagtgaagatggatatggcctctgttctcaatgagtttataatcatcaggcaaaatagttgtaccctcctagatttgcatataaaaccactctctctgtttcattgtatctttccatttacttaagccttgcaaataaattctgtctctttaccagcctgtccttttctctccttagaaagagtatgttcagaattttgcatgatcttagaagtatttgtggcagtgtgagaatacaaacaccattagatgttgcagtaggaaaaaatgttgagcaggaaccactcagaattattcttcacctctggcaggggagaaagtggtttgaatgaactaacagatcttctgtcacctcagctaaaatttcaactgccagattgctttcaaggaacacttcattagggacacctactctgccctccccattttaaatttcaagacaagatcaaatcccctaacatttgcgcatatctccagagcaacacctaacattggctctgttgactgtcaattgcttgaggtactatgtgtgaataattgcatgtcctgtgtcttttagcaggatattcatatgcatttcaggaaggggaggagacaaaatagtaacagtgcatatggaatatgacattgttggtagaagctggtaccctggttgcataaaaacaatgaggcctcttagatctttcttgatccattatatcggcaagggatatgatgttaagagtggcatttcaagaaagtgaggacttcttgtggcttgggatcaaccggtaaccagaatggcaaatggtgagaaagaaagtttttatcaagagcaatgagagagtagtggctaagtactgccccttggtacctttcctcattgtcctaacgttcttgggcaatgttctcgtcccttagggaagattatcccaacctggtagctcaagagtttcaacagaggcactggagaaattgtctgaataagagaactgccactgtgggctgatctgtcctgcagactgtccctcactgggcatcacccctcgctctagagacactttggaagcttggaaagggggaagccctgcttaaagagacaaaccatgggtccatctgatatggtgatatggtttggatatttgtcgcctccaaacctcatgttgaaatatgatccccaatgttggaggtggggcctggtgggaggggttttgatcatgaggatagatccctcatgaatggcttggtgctgttcttaaggtaatgtggagttcttgctctgagctgatgtgagatctggttgtttaaaagagtgtggcattcccccacatctgttgctcctgctcttgccatgtgacatgctgggtccctgtcaccttctgccatgactggtaaattcctgagaccttcaccagaagcagatgcagaaccatgaaccaagtaaacttcttttctttataaattacccagcctcatgtattcctttacagagatgcaaaaatggactaacacaaaaacattggtaccaaggagtggggtgttggcatagagatgcctgaaaatatgaatgtagctttggaactgggtaacaagcagaagttggaagagtgtagagggctcagaagaagacaggaagatgaggagaagtttggaacttcttagagactggttgaatggttgtgaccaaaatgccggtagaaatatggacagtaaaatccagactgtcaatggtctcgggtggaaataatgaacttatcggaaactgctgtaaaggtcacccttgttacaccttagcaaagagcttgactgtactgtatccgcaccctagggatctgtgaaaggttgaacttaagagtgacaactcacagtatctggcagaagaaatttctaagtagcaaagcattcaagaagtggtgtggctgcttttaatggcctagaatcaggtttgggaacaacaacaacaacaaaaaaaaacttaaactagtaacttatatttaaaagggaagcagagagtaaaagtaagtttgcagcctggccctgttgtagagaaggaatctagacaggttgtgtagcaaccacttgctagagagattaacatgactaaaagggagccaaggcatttcgaaagtctttggaacggcccttcccatcacagacccagaggcttaggagaaaataatggtttcaggagccaggtccaagaccccactgtcctgagcaatctccagacactgctccccacatcctggctgctccagctccagctgtggctctaagggccctaggtacagctctgaccactactccagagagtgcaggccataagccttggcagcttgcacatggcgctaagtcagcaggctcacagaatgcaagcatgaaggaagcctggcagcttcctccaagatttcagaggatgtatgggaaagcctgggtgcccaggcagaagcttgccacaggggtggagcactcacagagaaccaccactagggcagtgcagagggaggggaaatggggggatgaagcccccatgcagtttccaccagggaactgcctagtggagttgtgggaagagggccaccaccctccagcccccagaatgatggagccatgagcagcttgcctcttgagtctggaaaagccataggcactcaactccaacctgtgagagcagccacagggtctacaccctgcaaagccacaggagcagagtttcccaaaggccttgaagcccacccattgtaccagtgtggcttggatatgggacatggagtcaaaggagattatattggatctttaaggtgtaatggctgctgagtttgagacttgtgtgtggcctactgccccttcctgttggacaatttctccattttggaacaggaacatttacccaatgcctatatcatcattgtgacttggaagtaaataacttcgtttgattttataggctcataggcagaagaagataagtctcagatgagacttaggactttggacttgatgttggaacgagttaaggctttgagggactgttgggaagaggtgactgtattttgcaatgtgagaagaacatgatattttggggggtagggaaggggcagaataatgcagtttagatgtttatcctttccaaatctcatgttgaaatgtgacctctaatgttgcagatggggcctggtgggatgcatttcagtcacgggggcagatcctgcatgaatggtttggtgtcttccccaccgtaatgaatgataatgagttgtctaccattaccaaccacgatatttggctatttaaaagagtgtggcacctcccccaccccttgttcctactcttgccatgtgacacgcctgcccccaccccaccccacactgcttagctctctgctgtgattagaagcttcctgaggcccttaccagaagctgagcagatattggcaccatgcttcctgtaaagcctgcagaactagggaccaatgaaacctctttcctttataaattacccagccaaaggtatttgtttacactgacacaaaaatggactaatacatgtggtcatcctcacagttaacattctaactgttcttggggccagatgggtttgccctttagcacagatcaaagaggaatgccaaccccaaaccacaaggtaactccaccagataaattttaaaatagaagttgggggaataggccccggtatatgaggttcattttgctggaggtaatgttttgggatagttctatgggcttcatgccttagaaaacccactttctagtctgtgctcagctccacatacctgtgagccttaagaacacccaccagtttccagcgtttcttttactcctttctaaattgaggagctggcctgacactctcctggatcgcttccccccccagtacctaaaagtcaagccctaaaacaccttctcactttgtcactttccgccagcagtaatcagccaagctcttttaccaaaatggagaatcactggaaatattaacagaagaggtcaatatattgagccgtgtggccttttcctgttctgagaatatttcatgtctttatgttcttacattgagaaaaacctggtctgtgccaatctacatcaaatggaaaggggaggtaagagggaggataaacccaaacccaacctgtaccgtggctctttcaaatggcaggctcattacgacccagtgcctgacagcctcaggatggcctgtctcgtcagaggcccctctggctgttgcaagctcttacacacaactctgtgtcacgagaatcacagcaggtcttggcagcggacactgaaaatgtcagaaagcaaaagcgggtgtttgggagaagtcattgtgagctgggaggagcacttgcaatgtttgcagcacatacaaaacaatcaacaacaaaaaaacgacctgccttcttcgtgagacagcacaggtgaaaaggaggaagacagagatgggaagggaagggcggcaacaaatgggaagggagtcggacttttactcaagagaaactgggatactgggaatttggcctcattcatttacctggcgttttacttattaccatcttgtggtactaggcacagaaaatagaagtgtgaatgagcaacagtagcacactgcagagtaaagaccactggccttagaacagaacatacatgtaagtctcggtttttagcattcaccagttgtgattttgggtaatgaaaacactcagagcctcaggttcatcatatgcaaaatagggataataataggtcttatgaaataatttaaaaatttaaatgagctgttataagtaaaatgccagccacatagcaggaataccccaaatggaaaaaggtagacatggttcttgctctaggagaacttggagtctgggggcagtgggggtggggtgaggggtcttatttgtatgctgcaattacttacaactctatatgttacgagatacataaacaaatcaaatcagaacacaagaagtggggtaactaattctccctagagtaatgagagacctcatgaggaagggaaataaggagaattctagatgagaacccaagacacggaagagtatatgtgaaattagaggggtgagtcaagcaaggtgtgtttgtcccatttagaagacgtcagtggctgagcacagggtatgtggggaggagggacatgcagtgagctagatgaagctcaaggcacgaagggtcacacgtggcaatttaagttatctgacttcccctaccacaggtaatgaccaaccactgaagtctttttcagccctgtagtgaccttagaaatataactcagctggtatttggaggataaatttgaatgggagccggactggaggacaatcttaggagacccgtacgtggggaatctttgttgtgccggtctgttttagttgctgtgatccattataatgcttcatttgaaatagtgtcagacctaacgaagggcagtggcagtgagaatagagaggaagggtaataacaaaggctcagacttcagctgttaaaaggagccagctagggaaggagtgctacgtctccaattaactgtgacccatttctgacaatgctgctcattaacatagctttgtttacctacatattttagaactattcataaactttaagaaacttcttttcagctgagtaatgatttaactccttaaagaaggtgtatgagattttgccattttgtagaatctctcctaactaatggaagcatattggtatgctgagttcccaccctctgtaaggccctgcacattctgtaaggctgcagtacaaagatgtgaacagtaaaacgtatggtcctgcctggtaggagttgactgattcattggaaagacataaacatacaccaagtgcatggagcagttcaaaagataactgacaactcaaaacaatagtacaagtcccaaaaaaatatggagaaagagaaatgatggagaggcaggcttccttgaaagggggagacaagtcagggtgttcaagggcaggtagacttggatagaaccagcctccttctgccccacccagcccctggcttctaaatccatgtctccagacacactgtggaaaagtattcaccttgctgggcgcggtggctcacgcctgcaattccagcactttgggaggccgaggtgggcggatctcgaggtcaggagatcgcaaccatcctggctaacacagtgaaaacccgtctctactaaaaatacaaaataaataaataaataaaaataaataagccgggcgtggtggcgggcgcctatagtcccagctactcgggaggttgaggcaggagaatggcgtgaacccgggaggcggagcttgcagtgagccgagatcgcgccactgcactccagcctggcgacagagcgagactgtgtctcacaaaaaaaaaaaaaaaaaaaaaaaaggactcacctaagaagatgccatattcacgacaacctcagtgttcatttgatttctcactgattcatttgtgaatattggatattttgttaactaactgaccgagtcttgcgggcagtggcctcggcggccttgttgctcatttattcgtggtgtgatttacttgctggtcagtaagactggagcctgaccatctacctgcactaacctcaagaatgtggagcagacagatgcatttccagataaaacgaacctaagcactctaaaatccatgaataaaaggaacaacattggttttaaaagggctacagaaaaccatgctggataaataataattgcatacatgaaccggtcaatcattatttgtcgagcacctaccctatctgaggcactgtgcagaggaagtttggatgatttagaaaaagtgaaatatatcactgagagaattaaagggcaagggcaagatcttggtcatcttttatcttctgcgcactgcctgggaggagatgggtgaggctgtggacagaaggagaagttgagatacaaagagaaacactagtgagagcaattcctggccctttgtttccgactgcagaccagagcttttctgcagaaatgtaatatcaaccatatggctcatttttttgccatacatataattttaagtgttctagaggtcacattttaaaaagcaaaaaagataaagtaaaattattttgaaattttaatttaaccaaatgtattcaaaatattttttttaattctttttctttctttctttctttttttttttttttttttagagataaggtttcactatgttgcccaggctagtctcaaactcctggcctcatgggctcctctcaccttggcctcccgacgtgctgggattatagccatgagccgaaacaagtgggcaaaatattgcttcgacatgcacaggaaccagattttagctgtttgatagccccctgaggctcatgcccaccagaccggaaacagtaactacagatattgactctgatttctttcatgggaatgttcagaaaaaaaaaaaaaaaagaccaacaaataaacagataagcagacaaaaattggtgtgaaccagtgtatagaggaggcatggagaatgggctgcagcgcctggggcaggggctcccagcagacaggcagaaccaggggaggcttctggagagacccctgaggcaggcaggactttccaggtcagcaggggcccgtgcaggaaaggaggcagagagcagtgtgagactcaagcagggctggccattcaaagagctgtccaggtaccatgaaggaaaactggagaaggaggaaactgtcagagcccaaggagcctctgcagccaggctcctgaaatttggattgcatctttgggctgtggggagtgttcctggtggactggtttctggctcccgcaccacggcagtcttcttgaagacaggctcacagctggccatctttctgtcctggctgatgctaactacatgctctactccagtttagctcttgatgtgactccacttccaagaaggatgagagctgagaacttggatggattctaagcatcttattgtgtgtccatgatagcactgcagcttcctgcggtgaatgaaggtgctaaagatgtgagccaccatgaggaattctctctgacctctgtccttccacaggctaaggctggcatggagagaagtgcttttaaaaggcactggtcaggcatcaagcctacctcctgttctctctgtggatctccctagacttctgcttcctggagacttagcaggttatgctggcctggaggtattcctgctgggatctcttccaccatgagacaacccatggtcaagttgcctacctcagcatctaagcaatgggcaaattccttaagctaccaggcccactgtttctcagcacttgtgctcccaaagtggcatttcctctgaagtagagtgctttagaaaaaaagtggaggcaggctcaaccacgaacctggggaaataggaaatatggactgttgcggtgtaaggccacagctcacataagaggagctcacatctttgcatctgtggttctcaaactgggctttgtattaaaatcatctgggaactttaaaaacatatggacacccagggtctaccttggatcaattaaatcagaatcccttgggggtgccgagggaaaagcccctgaacaccactggttttgtttgtttgtttttgttttttcaaatctcccaggtgattctaatgaatagctagaattgcgagagacctctgctttctatgttggggttagttcacaggaggccaactagactggggtgtcggccaaaggctcatggtaattaagagcatgcatttgcctgacctcgtcccttagtgcaactctcgtgggcatcttgaggggatgataagaagcaagacaagaatagccagcacagtgctgggcccaacccatcagggacgcacatgtggaactcttagaacacagtcacagacatgcagggagaaactgagggccctgggacatgggtgagaaagtcacagccatgattttgatgaagaataatgcagaccagaattatccgaggattagatgatgtgttgcttgtttttgttgaaatgagagtattgcaaataatggattaggttgataccatttgtttgttaatttgttttggatagtaaaccctgatttaggaaatgttcacataagaaataaggcaaatacttatgattcctgacttctccttcatgttttgatagcaatttgatttgattttaaaattgacatattagtggccgggcgcggtggctcacgcctgtaatcccagcactttgggaggccgaggcgggcggatcacgaggtcaggagatcgagaccatcccggctaaaacggtgaaaccccgtgtctactaaaaatacaaaaaattagccgggcgtagtggcgggcgcctgtagtcccagctactcgggaggctgaggcaggagaatggcgtgaacccgggaggcggagcttgcagtgagccgagatcccgccactgcactccagcctgggcgacagagcgagactccatctcaaaaaaaaaaaaaaaaaaaaaaaattgacatattagtttcacgctattcccatcagtacggtcttagagactagggctagtttcgttgttctttattcactgttaaggaaaaggagcttgagacagcggtgctgaactgagcgcactgaggttacacagttaatgtttaagcctggacatgagctacattcttgtttcttcttccttggtgttttaaaaattctaatggcccacggacacccacagataaccctctctcctcatcatataactgaagggtgctgggtctgcacaggtgctgggggattaacgtccatttcccccctgggctgttctgacccggccatctaatcactgtggaggcaactgaggaaccttggaagaaaacttgaccatgggcaaatcacagagaacccttttcccagtggaaaaagctccagatcttttccttcctagcccactaagaaaatcttctcaaatctcctcaaattccacagtgacaaaggctgcatgcttctgaatggggccctacatgcaaggaacattcaggaaaacctgtgaatgcagcatcacaaagttctgtctcagcagctgcactgcttttgccctggcattcaggtgtatctgggcacccgtggagacccagagggtagggcagccaatgagggatggtagagttgccatagtttcgttcaacaagagcaggcaaatgctagattagagaggtgaccctcagcagagcgtggtgcctgtaattcagatcacctcctggcctgtacctgagccctgaggtgactttgagtgcaatcaatggacaaatcaaaactccaagaggtaatttactctcccccgtaaggaccatcagaaagaaaagactaatgcctctaggatgttgggggatgggatgtgatagtaagtgtggcagcagaaaagaagtccaggtccctgggtgcatatagggccaccctccatagtcagaggcactgcaggcaccagacccagagacccctgagtggcacctgtggctggtttgggattgtgccaggagatgtcaccagacaacagaaggaggagagcaaaaaataacagccaccccagaagcccaggagcccattccatggagtacatgggcagcatgccctggcttcccagaactatttggaaaggatttcagaagagcttccatttccactgagtgggtgaaggcagagcttgagaatgccttgtctggaatcttcttccaattactttaagccctgtgaggccacagcaatggagtttcaagaagtagccgcagcttacattgttactctcccagggccacttgaattgtgctaagtctcaactcctcaaagtcaaggtgtgttttcagacatcagcctgagatgctcaggtgaatattatcagccgcagggatttctgggaaagaatatttcttaagtgtttaaaatcacatctcataaatagtttcctgcttcgcttgcatgtaacaccaacattattcgtgccacgcacagctcaatgcccaaggctgtgtcataagacaaaaacctgggttctaattctggccctgccacttactagctcaaccaccaaaaggcaaattttggagttgttttgttgatgttcctttgcttttgtttgttttataaacttctttgaagctgtttcatcatctccaaaatcatgataatgatcgatgcttcatggggtgtctgtcggttaaagaggatgcaggaagagctgttggcataggtgctccccaacccgagagatgagccctgcgtccactgcaccagcatccagccatggactgccaaggaaatctacaccctggcccccttcccttggtggtcagcctgctgctggtgggcacccctcaggggctcagcccctatccttccccagggaaagccggtatctaccgtcctcctagaaaggcagctgacatggttgcaggttctgcgcactgcatgctctgttcattttctcacctcttctacccattattccatctccccacactcttcccactgcttcttatttttttggcaaacggtgagatcacacaggcttatagccctgggggaaggtattccacagctgcttttgagccccagcccttccagcagcctgggcatctgagcacaaattgaacaacattaatgagacacccaatctcagcattttactctccactgctattctaaaatcttcacaaaaaagttcaggtggttcttttcaagctgcccacacacatgcacacacaccaagcctcccaccccagggcctgtggccggcttgtgtgtgagaagccagctcgctctggatgtgcgattctgcagtctgtgaaggcacagtggtagattacacaagagaatggccttacagttttataaactatttattaggcccgtcctggagagctacatcaatatggccgtcggtgaagcaaagcagaagctataaaaatatcatctatcccaaacaagcttcataatcaaacaaagccccgtgctggctgggacaggcttgtgttctgacacataagggccctttccatctttaaaacagaccattaaaacaccagaacactttggctcacagaagtctaaatcaaaagggaggggaaaaaagagagatctcttttctccaagagtaataatgccttttccagctcctggaaaagctcattgcgatagagatgcaatattgcttttttcatagtggcttttccgtttctttccaatacccagaaaatcttctaggggttcaacatttccacttgtttccctctaggaatccctttctttttactccacgtgtacacagtagctatgcggcgatcccttcaatattattttgttgttttcccaataaataaagatatacagtttgatacatattccagaagggaaatcatcatcataataataacctgaagtagaatgttaccagcccagtactgtgctccaattccccaaggcaaacgaacacgggaggcaggtccgtacgctggggtttactgtgattaacatttccagccagtgctcctccaattggctccaaaacatgtcttaataaactgcattccaaaagcccttatatttccaccttattgcattctgctagaatgagatataatatgtggacgcaaggaaaagtgacattcagtgaatgagctgcagagagttatataaggaagctaaatctcactccctaccacctggcatactgcttgtggctcctcatcatgattctagaaatcagtctgcaactaaaattcatgcatggggatgctctgctttggaccgtgggctggggaagagaggtgtgatatgcttttgagagggcagaaggcaaaagagaggaagaagggctgcagaggtggttggtccactcagagttgcactcccatggcaaggtgctccataaagaagtctgagaatggagatatgcagaactgagtcactcagagctaggcagataatccagcacctcagtctgggagaagttttctatgacattttgattgtttttagatctgggtagaatttttggacaagaagaagagacacgggatggactgcagagcctgagcagacacatgcaaaggacagtcacggcaccccacgctctttccctatcccccattttcaacctttattttctttccatcatcctggagatgcacaccctctgtgacctaggaggttgcatagagaggaaaaaatagtatctgtgatcacattttcttgtatttacaaaacacaagaaagtacattgacggcgaagtccatgagccctgaggaaatgtgaatagctttcagactgaagagtattcaccctgagtatatgcctgataggtaattcttagaggtgtgggggccattcaagtaattggcagtaaatgctggctactaagtaataaataactaaatgtgtagcatctctccttcccatctgagccctgcacgtgccacggagaatcaaacacatgacagagagtaaacggatctgagttctggactcagcccacacatggtcaccttcagcatctcagtcaagtcagtgacactgtctggttccaatttaccccaaagaagaaaggatcaaggctgagatacatcacacaacagtgatcttaaggtctgatctggaagagaaacccacacagtaaatccactagcacacaggtgcccattagggcttgaagacgcaggtgacagatcttggttgaagagtctgctctctttgagcatattacccttaacatcctaaagaaaaaaaaaaaagacttcacacacacacacacacacacacacacacacacacacacacaaaagcatccagatggtttacaaagaagaaaaatattggagcaggtctttcactttcaaacttctcttagtagcacagctggatcttctgtgtgagaagagttaagggaatctcagtgagagctgctcacagtgaaaatgatatgattttctgggatgtggtggaaagaagcaccgcctccctgaaaaagtcatcactgtgggtccatgtggtaccatagctttagaccaccgagaaggattttcatcactgacaacagcatgaagcggtgttctgcagaggcaaacgggcacatgcagaaatgactctcacacatctgctgggaggcaatcacacccacagatagaacagagcagtggcctcccctggtgcttgagatcaggggctgaagtcgcaaggctataccaggaagaattctatcactgctgggcagcacctgccttctcctcctcttcagcttgagccacctcttttcctttccagtccttacttcatcaatgtggaggtggaccaagttgataagttaatgcatagggttaaaggtctcttcatttgttgaacaaatatttcttaagaatctacacttttccaagaaaatattaaacatttcttcattgatgaagaagatggacttcttcatgaggaggtggaccaagctgataatttaggcatcctgattcacacccccatttgaaacaacccaccacacagctaatataatgtgctatggcttcatcacaattctattgacacaaaccaggtgtgaggtctgcgggatgccacaccaaaaagggtaatgaattaatatggacaaaacatgtttcaagggcaaacctgcaaacagaaactttctttttttttttctttctttctttctttctttttttttttttttttttttttttgagactgagttttgcttttgtcacccaggctggagtgcagtggtgcagtctcggcccactgcaacctccgcctcccaggttgaagcaattctcctgcctcagcctctctagtagctgggattacaggcacctgccaccatgcccagctaattattgtatttttagtagagatagggtttcaccatgttggccaggctggtcttgaactcctgacctcaggcgatccacctgcctcggcctcccaaagtgctgggattacaggcatgagccaccacacccagcctgcaaacagaaagcttcaaacccaacttctttcactagggggatattttcatcatgtcactcagtaaataaccaaagagtaaagaacgtctagttaatgcataggtttaaagatttcttcatttgttgagcaaatatttcttaagaatctacacttttccaagaaaatactaaaaatttcttcattgatagaagtggtaaaactaggcattccaggagtcatacaaagctaaggtaggtaagcttacaaaatccaaggaaggctggcattccaggctttacaccgatctgaactttgatacaggagcataggcaggatctgaaagtatggtggatgacaacttcctattgcagaatctgtactcttaagtgtgtaaggaaattacaaataagcaaaaagattaccaaacatcttcagggaaaaacaatgcattgtttagagcatgccttactgggttattatttttttcaagtaaaagcaagtttattagagaagtaagaatggcctaagaatggccgctccctagacagagcaccccagagggctgctggttggcttgggttatttcattctagatgttccttgcttctgagctattttactactctataaattgtagataattgatagcaatgcaaaatagttcttgtctaaagacatacaaataaattctatctggtacaggttcagttgacttccctcaaattcatagaaaaagccagttttttgtccatttgcaaatcacagtcaatagtgctatatttcatatacatttgcactcctttgacttacattttgaaacgaatataacatctgccagatttcctcattaatgagttaaataaaatatttaatgatcatctatttttggtctatatgagaatcatgattttagttttactgaaaattatcccttaacaagtaaagagagatgctccatgtatttaaactaataaagaacataacataaacattaaccgccatggaatgtaaaactgtgtccgtaaatgatacagaactaggatgatgaatgaaggacatgtcctctgcctgaatccgagtgaaaaatttcctttagccacatttgggtaacgttttcattgatttggcagagggaggggatttctggtagtaatactcaaaatacactgtcgtcctgtctgtattttatttagattgaggtctgcagttagcggtttatttgcttctggtgcagattccagtcattgtcagcccatgatttgccttcacagtcacctgaattaaaagactccgcaggtactgtggagtgaggttcatgattctggaagcccgctcaacaattacattacagactctgatcatagaggtgatagaacagttttgcagtaacttttatggaatggtgcctcaatgtaccataagcgatagacacaaagaaaatgttaatttcatttctcagaattgcatcacccattgtccctctgtgcttttgttttcctgatgtcttatacgatgcttccaactcctgcgtagaagcgtgtggaactctgtaattcgggaacaaggcagattgacttttctcagacccaactgtgtattcaatgggtatataaataaaatacattttaagactgttttcttctatttcataaaaggtagacattatttgtgatgtcattggtagaaatgaaattattataattcacttagatgtttggttgaagttcacttttagtaaataggttaacatagaattcatgagaacccacacaataatttgacgtacagaggtaaaataatagttttttggccttcagttcccaggaattgctcataattgtatcattgacactgatccaaaactcacatttattttaccatgaacagttgcaaacccattaacagtgaacagtcatacctccatgtgccccgccatgctgcaggagccaaaagatggaatgggaccacttgggaaggatgaataggaactggccaaagacttccttccaatgggattgacaggtaggtaggcttctgaggtctctcctgaagaagctcaaaacaataatcaaatatcacttacctagggaaagacaaagggaaaagggatagagaataaggtgggttagagtttactgcaaccaccttatattccactgagattatctattttaagcaaagggatgtttagtgcaatgcaaattatccacaagctccaagtaaaacccaagttttaaatacccagggaaaggtcagttgtgaaaatggaactttgttgcaaaggccatgcaccctgctgtttgttttcttttctgttctggcattcttatacaggtgcatttaactactactagaacataggccttgtaacaagggactgattggggactctgtgatgtgccaaggaaaggagaaaaaatgcatacgtcccagctgccttaatgattatggaggttctgtagctatgtggttcagatgctgagaagattgaactaataaaaaagaaatgagagaactgtcatcacagattacatagtatttatcccaaaatctgttcattatagatatttgcaagacaaatgggtttttagccaggaatggcagcattttcctcctggtaagtgtataatgaggcacccaatttgtctagagcatgatctctctctcttttaaaaaacatatgcctggctctaaatcttagtaaaattcctgaaaacatccattaggaggtcagcaaaaaaagttgaattcgtagagttctttacaatttacagaggattttcataggcactgtctcctttgatttttatggcaacattttactatgggtagaataggtattactactgttccctcctccccttctttctccaatttctcatcctcttccttctatttctcccccttctcctccttctccccttctttcttcttcattccttcctgcttctcttcttactcctccttcttcatctcctccttttccttcttctttataagcaacatagggcccaatttgattcatcagcttgctcaaaatcacactcatgtctagtggtagttccagggcttgaattgtgttcttcaggtttcatattgctttctctttctcccttgatcaaatcccagacacagtataaagatagccaagaagaaagatagggagggagagcaggagaaaggagcagagaggaaatagataaattcaggaagagagggatggtaaaaataaggaagtaagaaagacagaaaatggtaaaaatcatcaaatatttggagcaaattcttcattaaataaatatgttcaagtaaagagcatagaaaagtacctggcatgtagaaaactccatacaagtagttgctattattcattttttaaaaaattctattgacccaaggaaaacttgactagaacagaggatgccatccctacaatggctcctcttggtctctctgccttaacatcaaaacgatactggtcaaaggaataactgtgtcagagaaatgtcattccacaggggaaaaaaaactataaagaaaacattttttgatcatgttttaatctcttgacatggacaaatggttgattcctggcctgctcaccagcaacaacgtactagacactttgttgtctcccagtagccccaatgaaccttgactttcttctcaggcagctacaagagtctcaagcttacttgacatctacattgcatatcagactgcttgtgtgataacaaaagcggccataataaatgtcataaaacaagatatgcgctggaggtgcagaaagaggaaacagtcaactttcatatataactacaaatttctctgtattatggccattatttgactagagaaggaagttcttagacccagatcagcaggaaaaaaaaaaatgaaaggggacttggtgtagtatcatagggtcatcctatttgtagctttttaatgaaaagtaattatagccttattcaattatgacccaaatgcacctaatcccctcataaatgcttcttattcaccacccagcactttctgacactgctggccaaataaatggtggctgtttctacctgggtgatggcaaggttgttcattgtaacactccatgaaacttaattatgcaaaacaaagaggcaactctggagccattaatcagaggtttcattcagaagtaatttgttgctgggacccaaagaactgttcttctggttccttccactgtgctgcactaatagttaatccctggctttaatggaagttgctggggttgaagctctgaggccaatagtggcaaagcagcttatgaacatcaccttgcttattagtgggcagacacctaatttcttctacttaagtcacctttaattacagcaaccagaaaccaaaaccatccacaagttatcaagaacaagtgcccaatcacttatttcccaattgcctaaaggcagaacaagagaaaatgggtagattattaaaagtgagttaatacgtatgagaaagtgagacaagcatacctgaaattgacagaagaaaataatttataccatctctgaatatctccagacagaacatactgtacctagctttttattagggaggatttcagtatttcctcctaagtagatgaaggggtcaaattattaggatgaccctaatttggatggtgcctgaggagctccatacttgtctgtgatgaagagcaggtgaacgggaagaggaggaaagaagggatccctacctagaaaaaataattaaataccgccacgaccaccactaacatcagcaccatcattaaagaccttcagtgaagttgagggtccttggtataaatctccatactgattcattcaccccttataaattactccctgtgctaattaaattctggagacacaaagatgcacatgccacggtcctttctttcagtgagctcacagtcaaatgcagaagagctgcaaagcaaagcagtaggaacagcagtacagacagaggggaatcactatggcagaacttaggaagagttcagaagcagagcatcagaaatcatcaaaggggaaaagaaatgaaggatcatggaggtgtaaagattaactgactgaaagattaaggagaaagagagttttcaagtaaataaagtagaaaaatgagaagagcttggaatgaggaaaaaccagccccctgatgccaaactgacgttcatgcttctcccctgctgctcttgtgtgaactctatattcaaggcaaggtggtctccttttttgtcccccaaacatccttgcttagcccctcttccaaacctttgcttgtgctttacctgtcagtgatgcattcctctgtatttttccaaattctgcctattctttcaaggtaagggtgcctcaaggtcaagtgatttgtttcttctacagcacagtattgtccatatcactcatgtgtcaccaaatcacaatacttcctgatgaggtgtctaattttaaaagatgggaatcgtgtggtgagcggaataatatcttctaaagatatcaggccttttccctagaatttgtaaacatcgttttgtatgaggagaaggggtctttgcagctatggttaagttaacatggagatggagatattgccctggaatattttggtggactctgaacaccatcacaagtgttcccttaagagggaggcagagcgtgatttcataaagacagaagaggaggaagcaatgctaccacataggcagagactggattggtgcgggcacaagccaaggcatgtgggcagccgccagaagctggaagagaggagaaaaggactctcctgagagtctccaggagtacagccagtcaacatggagattttggctcagtgatactaattttggacttctggcctctggaactgtcacagaataaatttatgttatttcaaaccaccaggtttatggtaattgttagagtagccataagaaactgacacagatgtacagggtggctacacatgcagaattttgtttatgctcatcagcctagcaggattctaacaactctcctttcactctcaaaacagttctagtttggtgataaactatatagtcaccctagatatgcatggtattttagtctttgttacatcatccatggtacaattaacacaatcccatgcctagagtaggcatgcaatatatagtttttgaagtacagaggaaaaagtctgtcattttagaaataatttgctcacaagcttttctacaaattttggaaacaaggaattactttggtggctgaagtagagagaatctgctcagagatatttattgcttaaagatgaggttttcaatttggtctcaccacaaaaatacgaatttgaggtttgttccaaaatgaatacaggtctcaattccaggttgtatttttttaattgataacattgagagcttttgttagggatgaggacatgttccatatgtttaggtaaatgtggttttaagtctttcttggctttatttcagaagaaatatctatgtaaacttttttgataaaatcggagggggaaactggaagtctcacttaaaataattctttgacatgcgcttaggtagtgtacctggactccttcagagtaaatgtctgcttgtttgttcatatttatgtgtggagggtggggaaacaatcagacaacaacttaatttggacactgaacatatacaagatagtatgaagaggcattaaaaaaagttaacataatttcagccaatgacatcttctggatccatagtcagaaactatatggactcaaattacaaatacccatgaatgtgaattactatatactaggcactggaaaatgtaaaaagtagaatatttagtccacatacgtaattttgttggagacataaaaagcttggaaagacatagaagatgttaatcaatccaaggtcaatgcaagactttattgtgctaagttacatgattctgactataagtgtcagaaaaattaggagaaggaagagtccattgtgagctaagataactgctaaaagcttctgatatggcttggctctgtgtccccacccagatctcaccttgaattgtaatctccataatcccctcatttccagggcaggaccaggtggaggtaattgaatcacaggggcggttcccccatgctgttctcatgatagtgagttctcgggagatctgttggttttgtaagcatctgtcatttcccctgccggctctcattctctctcctgccaccctgtgaagaggtgccttccaccatgattgtaagtttcctgaggccttccctgccatgtggaactgtgagtcaattaaatctcattcctttataaattacccagcctcgggtatttcttcatagcaaagtgagaacggactaattcagcttcatacagagaagcgaaatgacctggtgtgtgaacacatgtaggattcacactggcattcaaagggcaggtggggtggtgggcaaggctacttcaggtaacagtatatgacagaaatttcacatggcacgtgcaaggagcaccacacaacacctttgtctcagcattaactactgcatttggtttaaaatacatgttataatatttctgaaacctcatatatcttagaactcattcctccctattcctcgaggtaacgtgaaaatttcaacctatcctctgaatctaaattcttatgaattgagctgattagaagagattctcacaatttaaagagatgttacatattgggatgtagtgatgcaaattcatttaaataaatttaattaagaaagatcacacaaacctcttcctttctctaatgctactgaattaaatcaacataggaatgattaatttgacaacatactaaaatgccaagattttccattgactaacactcttcacgaactaattgtgtttggatatcggttattgagcaaaatacctgaatattggatgacttaggctgatcgtggttatgaaatatttgcaaataaataagcattgtgaagtaagtgaaaaatatctggaaagaaaatgcagcccaaaagtaaatacactgacgtatgtttttagataatgaagttggagcaaaagagggaaaatatgagcccccctggtgcacaggaaagacaattaagacacagaaatggaggttggcataagggaagagcagcacttcaaaagtatttaagcatgtagatccaatttccttaccaggaggcaatcatacgcattgcatgagaagagaaactctaacaaaaatgtgccttatcacttgctttctaccttcatctacctactgcacaacagaatgcaaatggtaaactagaaggtttcatgactgctaattgctgagtctgctattcattgcggttggcctgttggttcatcagtgtttcactaaataatagagcgagaaagtctagcaacaaaacaaagaacacctggattctattaataacttgcatcacaatggatatttgaatccggtctgatgtcgaatgagacttgcataaaatatgctaccatatgtgttctaagattgaccttggcctattactgagggtacgttattgataaactgatgttagtcatttactagttagcacaaattaataatgagagagcagcttgaaatgtggggatgatgagaactccagaaagtttgtagaaacaaaaaaaaaggtggaagacactgttgaatagaaaaaaagttgcagaatagggtcacctagggcaaatgatgcacacacacagcaagtgtctctgtgttatccattccatgctgtcagagcaaagaatggaagcctgaaaactatactgctatcattctatgtttttggttgtagatttaaactttaataactactggaacacttaatgtgaaaattactcttcctaagtcaagtttatgtgtcatatttttaactgatagaattgataaatttgcgtactgtcctttctattttacaaggctctttgaaatttagagatgttcgcacaagggaatacagtgctctacatgactgaatccacaagggaggtaagcgtctactgccaacagctctagcatgggtaggcccataaatgcagcaaacgtctgctgggacatgaagcttacattcactataacgtagccccttaattgtaggataacaataagagggatgcaaggtatctgaataatcacatataacatttatggagctcagcttcttggcccgtttccttcttaaaatacaaaagacctgacaggcctggaggacagaataaacttagtaaacagcagacactatgctaagcacttcacaacgattccatgaactgggacctgttatgccttccattttacagatgcaaaagcaatgccagagaaaggatgcaatttcagctccacaacgtgtgcttggataccaccatgtgcttggccattctatgccgatgccttcttgaactcttggcctcccaagtgctaaggttacagacacgagcccctgctcccatacccaatgccttcttgaagcaaaagtgtgaaaacatggaatatcccaagcgtctgggccaagatgaaggaaggtaccctaaaaatccctgaatatggcaggagaattgattaagggacacaaatgttgccatggaaagtaaacaactaatgcccagtatcttggcccacataccttaaccaccacgtaaccccttccttttcaaaaacacttttgagggatttttccttatgaaaatgaatttcaaattatgaaattgagttgatacaaaagtaaaattcattcacaacaatttgctgtatagtcaaatatcttgaattctatcttaagtgtaaaaagacccacctacaccaagatatgaactataggaactacagtctcaaaactgcaactcagatggagtaagcaacgcccctgccctgcagcttttcatgcagagagtgataagcagagtctgattcctaacttcattctccctcattacaatcactatctctttctcctattcctatcaaaggagaaaaaaaacctttctcttaatatttatctcacagagatgttgtgagtattacataagatagcagacacgaagcaggcacagtgactgtcttagagggatgtaatgaacacttattattataaggttcttcagattcatgggcttcccccctgtacccctctccaaggacgaccacagcaacatgaggatgtcaacactggaaaaggatgactgactcacaagtattttcattgcatgtggaaatagaccaagccctgtgggaggttaaagagccttcccttcagctaagaacacagagaactcaaataaacatatcataaaatacaggaagtctgactgtgagaattatttaagtgccttgcacatggatatgtagttacgtttaattaaatcaatagctttaagtgattgcctattacagccatgcttatcattctccctaatctgttttctaaggccaaattttgccacccttttctctcatatttcctgatgtatagatttacattagggttcccctccaccccatttatgtagaccagcatctgctctcttcttccctgaataattaataactatgcatgttcccagagcatcctgggacctccttccgcaggcgttccctcagagcagaagtctttttctgttgatcataggcagttcatcttagaattacacaagtgggagccaagatcaatggcaacctgatttacagcagctcttaccaacagcttgtggaaattagaaataaatatggggtcaaacgactcaccagtaatttgacattggtaaatctggcttatttagaagtcttaaataataaggaccttcacatcgttatttcaactgaaagaacgtcagtgctttgccttaagagcctttgaaagctgaaaaggtgatttaaggtatattaccattagaagtacttttctattatcttaagtattgcaatgcatctgaattggtagcacagtagtgtaaccattcacagccctaactggcatacatcagtagaaagacccatagaagaactgcccttggtcctgaaatcatgagtgcagcccagctccgtgtttctgttttcaggttgtattacaagtcaacaaaacaggtgtctgtgtttctgagtactctggaaataccataatgacgcagcaaaataccacaacaaagtaattcagaagcttcatggattaaatgagacagaagcaatgcaaaatatcaaacaatgacaatgtcataaccaaatatactattttaagaatactatggtgcttaattttgaataatgatttgacgcggtcactctaaaattgacattggtttcaatttacaaaggaaaatctcttgtcttggaataggtataaaatatgagttttgaacatatggggcaacttagcagaggcagcagtatatatgtgtgagatgtagtctccacattctgcaaaagttgtactgtgataacaatgacaagactgaaaatgttatataactgtaccaaaatctgataaaatgtgaaaacagctctcaagggggcaatgtagtccatctcaccttctaagagttcagttaaatgatgaaggggttgaaagtgtggacccagttttgaaatagcacagggaaagacattctacaaattgatgtggttcataatttgcctgacataagagctactcttcatgcctagcaaaaattttccatgccagaatctgattctgtttcttcttctggttttatccttaaccaagacacatacagctggccatgtaataggtatcatacaattgaaaattgcctgatcaacttcagggcagtatctgtgtggttagtagataaccctgtaccacgaatgtagtggataagttatgacatctttaagaaacattcaataacttggtaatatgatacagacttgaggctggacggtcatggtcacctctgctctcctctacctccctccgctgttcctcccctccttccctcatggaatttcataggcatagcacttcacaacatttatacatccatttcgaaagtaaaagtaaatgaatgtcagaggcagcaacataggtggtagtcaaagctagggaaaatgagaagcaaagagaaggaagtggcataagagatgaaattcaattccctagtttttagacaggaagaatctatgtctcaagaagatgaaatggcatgataggggttatgtagctggtcatgcatatggccaaaagcagaatgaatcttctagttttgatttctacgtcctttctgctgtattatgttacaaaatatgtttatacacattttacagtgtacataatacatatataaaagagtacccacggaaaagactaatgtagacaaaatttgtttttctgcactgcacttgccctttctttttcttttggctgtccccatgaccatgatgaacacactgttatccttcctgactcaggtcaaacatcagctgttctgaccctccatattagacccaacccagggaaggagactggggcaagagcaacagcagcaacttaggttttagatgttcttatcaagtagcaaactgggattgaactcaggtgcgttttgattccaatatctgcaacattaactgtgccacattcacagtggaagtttaacaaagatgaccttcaaaaagtgcttgatccatggtagacaagcaaccaatcttatttatgctttctcttgtttccaagttttttttttttaaattttacctcccaagcaagttatcactgacttactactctcagagtaattttattaatcaaaagttgtatacctttttttttaagtcaatgaacatatatggagttctgaatcatgtttagtgtaagagctagaaatctaacaatgaaaagacgagataagagccagattgtgaagaactttatatgcaataccaaacacttgagcctttgtcttatgggctcaagggagatatggagaatattaagcagtagagcaatagaatctgatctttattttaagtgaataaacctgactaccatgtgaaaaatgtatccaaggtgaacaaaaatcaccagcaatacctgtttcagtggtttaaccagcagataaagaagtcttagtttataccatagactcttagaggaaggaaaacaaaaagaactgtacaccaacattgtactttagtttttttttccttataggattaaggattacacaagtatgaaacaacctaacttaatattagggttaaataaagaaagaaattatagataatcaatgccagatttcttacttggagaaagaggattcaaataagaaaaggagaggtgactagaataaaccctgtggagctgagtagagtcaaagctatcaatatggactcatgggatttaaaaatatactgcagatatatggaaaggtagaacaatagatagatacagctgtgtttctgtatgagttagtccacatccgtacatttcccagccccattcactcagagaaactagatgcagttaacccacagtaacaatgagcacacccagcaccaagatcttggtttctaaataccattcatcagtacaaaaaaacaaataccattcatcaatacagataacaaggcctggcagagttcaggattaagaatggaaaaatgtgagtctgtagcacattttggtgctgaaaagtataaaagcaatctttaaaaaagagagatgtgtaacattaaaacaccaaagagccaacttcaaagagttcacaataactaaaattggagcaacttgaaaagtgaaaaaatagcaaagattaaaataacatccatgagttcacattgatataaacgaataagtgaacacttaaataaatggaggagtagaccattcttccttgaaggagaattccaattaacaaacatagaaagaatgggagaaacagaaaagcaccattagaagtttacagtaatgattgcttcagacaagaaccactgatgaatactcaaaaaaatgggcagaagtttaagcagaaacaagatacatttctctctacaaatatttacaaagggaataaagtaactgtgcaatgaagaattctggcagatactgcattcaccaagggatcagggataacatcaccagtgaggaacacatgtcaatctcatataccagctgctgtcatgaactgtgaagggcacaagatctctttcgtgtccttcccaataatttataatctcatactaatcatcatgagaaaacatcagttaaatcccaattgtggaatattgtacaaagcaatgaaccagtactctgaaagtgtcaaggtcacaaaagacaagcaaagactaaaaacctgtcacagattggagaatactaaatgcagaagaagacacgacaactaaatgcaatgtgggatcctggattgaatcttgtgacagaaaacagaactgaacatggcatttatgggaaaatggttaacattctaatatgttctgtagattagttaacaggattgtgccaaggttaatttcttagttttgataattattctatggttatatagaatgttgacatgaggagaaactggaggaaaagtgtatgggacctctgaatgttctccagaataaaggttaagcaaacttgtagacagtggaactggagatggatagaggacaggggagcagaatccataagaccagtgatagatgagatgatgagtgcttactgacccaaggatgagtgatgtctattggtggggaagtcaggtgggaatgcaatgcttgaagggcaatgaggacttcattctggcacatgctgactttgaggtgcttctgggacatccagatggacatgcaaatgaggccgtttgataaatgtgtctagagtacgagagagatgtaaattggaaatataaattgtgaagtagtcagcatctagaaatttgttagagacacgaagatggataaaatcgtagagaaagaacctgaatgatgaagagaaaggagtctggagggtgaaactgaaatttaactcttgttcgcacaaatctgatttcacaaacttttgtggaaaaggggtatggcttactcatttttgtagtgatacaacttagtatttgcctggaaaatgacatgggcccataaatgtgtactgaacatatgtttgcatgcacaaattaatgaagaaatgaatctctctccttggacgtggggattatatggaagtttcagtctctctctatgcatatttcagtctgtcagctcagctcatgatgcttgaatctcagattttatttaaaaggcatttcccttagtttaaaaatctaggtaattggcagaatggatacctcaaagcaagttatactttatggcataaggtcaggtgatatatattcccctcaccatttcttagagaatggtaaaatcatcaacagtcttattttctttttaatgtggaaaatgcttttttgggccctgtactttcccagcaggccgtttccagaacaaagaggggctcacttcagtccccttttataattattgctaaatgcccaagcactatccttccctggaaggactgttcccacccagggttcaggtggaatgagtcaacccaccttaagtgagaatcctcagcctgaaatcctggctcaaatagaaaacagcatctcactctcacctacaagtcctcacacaatgtggagttcctgccttgtgctacccagcacttccaggtaacactgcgtgctatgcaaatattctgctaacatactttgctttgttctggaaaacagtgaaatataatgatattttaaaagatgagtggctgctgaaatccccataacattgcactatttgagaaaatagagcttacctgaatattttaggcttaacaattgccaaccagatggcaggcagcaatataaaaggtattacaaagctccaactccttatgtgtgtcatttagtaggatattgtactcagaatcctgtttcatcactgttgtgttagttactcccctcaccacctttcagctttcttttctcatgccaacacttcagggaaaaacatcattttaaagcattgctttggatttctaattcattatcttcatgtttattggcattttccttgaagctcttctaggggtagaaattagggaagagaggtggtttactaggagggcaaaagatgtgagttcagaagaagagatgcagaacacacttattcttcttgttatgcaacataacagcttttcctccagtttgttgaaagcactgagaatttggcccagactttctagtgattttaggcatcaaaactgcatcattagtggtgaggtcttaggattctaaaagcaaaatgctcagctggtgttcaaacagaagctcaggtacaatgggatggggtgtttgggtcaaatccagctgtaggagaagaaataaactctaaataggaagacaggacgtagtgttctaaaaaatgtatgattcagagggatcaagaaagagaaatttcaagcaatttgggaagctaagatggaatggggcaggctggccacccacaggagtgaatgtggcctagcagcagatagaagggcccacactgtgggcaggagtccattgtctgagagcaagtcaaagtcaaggcccaggtttggggaaactggggcatagagaaattattaaagtagacattcaggcgtggacacaaggagacaagctatgaggacagtgttacagctgggcatttctgacagaagtgtcacagtgcttctccaccaagagctggggccacagccagagtaggggagatatggaacagacttgatgttgaggcccatcattcactgcaggggctttattcactctgctgcagaatgagtcccagtgcttatgtcaagctgagctggcaaatcgacctctgtccaggaaagccaggaaaaaatagtcacagtttaaacataaaatatatacataatcaaatagatattaaagatgacagtcatttggaggctcatctgctgaatacttttcctctgtagagattgagaattcatttatatccgaattctctccaaatatgttatgacaaatgcattcaagtgataaatgtacacagccagtgaagctcctctaatcaaccaaaagaaacaaatatgcttccccccaaaagaaagaatatccaccatcactactatcacaaaggacatcatcaacagcaacaacaaaacaccgcattgtgagacttgtttcgcacggattctctgatcttgctcctctccttcgtttcacccagcctgtgtgtactcagcatctgtacctgagcagtgagaatgaaatcagagaagatgagccgtagccctgaataggctgtttgaattagttccaaggcaggggtaattgtctaactcttccctttgctcagcctgtgtaaacacagatataaatgattgatcaaagacagaatagccccataatgatcaaaagaaaattagtggaggctcaaagaaagtgtattgtctcaagattgaatactaaagggcttgaagccccaacccaagctttactttcccttctactacttgcaaggggttcaccacctgcttagctaaaaaatagagttttttaaaaagttcaagtttaatgacattctaaaactctgtcatttaattgcctgccacatgataaaaagtaatataaacagtcatttaacttctttaagcctcagttttcttatcctcaaagttggaaaaaaaatctcatagatttatactgatgattaaaggataggcggtatattaaaatgctttcataatgtcctattcaccataagtgtcccaaagacaagtttgatggtaacataaatgaatcaataaatgaatgagtgattatacacatagctagagtgacatagtgacttccgtgcatggacagcataagcctgcactaccgtttatctttatggtatttatcactatctgatagtacatgatatacttctttatttatatgcggtctgcatccccatcgccatataaatgcacggagcagcaaatttgtcttattcaatgtaatattcccggtgatcagaacaaagcttagcacataataggcattcagtcaatatgtatttgataaatgaatgaatgacatattcaggatttgaactgaaatctgcctgactccaaaggtgttatctttaaacactaactgttcacaaataaatagactgcaaatcatagaggcagattccactcaacatcacttcggtcttacatagttttggtagatggaataatgtccctcacttccaagaacctgtgaatgcattactttacatggcaaaagggatttttgcagatgcaattaaatgaaagaccttgtgatggaaagattatgctggactattccacgagtcccatttattcacaagggttcttaagagcatcctggaacatttccaggctgtggtcaagaaagtgatgtgacacctgaagcggggcccaagagatactataatattggctttggatatgagagaagaggccaggagccagggaatgcaggtggcctttagaagctgaaaagacaaggaaatggatcttctcctagagtcccagaaacacacaccatcctaccgacaccctgattttagcccatggagacccgagttagatttctgtgctataaaactgtaagagaaaacatttatgttgttttaaaccactcaggttgtgttgatttgtgacagcgatgatagaaaactaatataatggtacagagagaactatcagtttgaagaagtccattatttatttgctataagaatacgatttcaggctgggcgcagtggctcacgcctgtaatcccagcactttgggaggccgaggcgggcggatcacgaggtcaggagatcgagaccatcccggctaacacggtgaaacctcgtctctactaaaaatacaaaaaattagccgggcgtagtggcgggcgcctgtagtcccagctacttgggaggctgaggcaggagaatggcgtgaacccaggagtcggagcttgcagtgagccgagatcgcgccactgcactccagcctgggctacagcgagactccgtctcaaaaaaaaaaaaaaaaaaaaaaaaaaaaagatttcagacattataagaaactagctaaactagctcacattttaaaaactaattaaattcaatacactacagaaccttctaaacatccttctaaacttcatgtcaaaattagacaatttgaaacttggaaccaattgtaaacatttctccctttctacatgtgcttatacgaaaatcttgaaacttctgtggatatttttttgccccagaaccatggattggcttctgcacactattcatctctacagccaaaaccttcctctgctatgttttccatgctgccttccataataagaaaaaaaaaaaaaagaaagaaaagaaaaacacagtccacgctgccatcatttcctaccatattcatgtctttcccacacacttattgctgcagcctttctaggaagaggccctgatgttgactttatcagcagccctcgactcaatggtctcccccacagaaccatcaggcacgcctggccaggacgctaaggctccatgtgcccacggctcccaagcaatggacattgccgcaaaaaattaacgtgcatctgttcatcactgcagacggcagagagagtgggctgtaattttagcttctatcccccaaataatgtttgttgtcgtgctgtaatcttggcaatcagcgtaacagatgaacatatcgtttcatccgaaatatttgctaaacatgataggaccttgaaaaccacacctcagtgtgtgtgcgtgtgtgtgtgttagaagagaaaccacgtgtattgggtagaattaaaaactgaaccatgtaaaacctaactaaataaggtaaaatgaggaggtttgcaaattcattgaattagatgcatgtctcttattatacatttctctggaacttagtattttcttaaccttaaaaatgaggctttcagacaggtccagaaaagccatgtatctacttttccttttgtaaaatatgaaaatttaaagcatgtgcactttttaaagtggaatctaatgacaataaaatttaattggacatattattcttgtgatattacattaacttgagtgccgcaaactcatttgcttataaaatcgccttgaccactgagaggactctttatttctggggtggaaatgctggtctatatgttgaattgacacttaggaaaaccactactagcactaaactagaaaatctctttctttccaaagtcacctcaagatgaaattcacatttgaggccattgctagaataagcacattaaaaccatttcaggctgggtgtggtggctcacgcctataatcccagcactttggaaggccaaagcgggtggattacttgaggtcaagagtttaagaccagcctggtcaacatggtgaatccctgtctctactaaaaatacaaaattagcccggcatagtggcacgtgcttgtagttccagctacttgggaggctgaggcacaagaattgcttgaacccaggaggcagaagttgcagtgagccaagatcatgccaccacactccagcctgggagacaagagcaaaactccatcccagggaaaaaaaagaattcatgtccctcttcaccttgctctatattatatatagccacaaaatcaataccttcatcatcagtgaactaattcgacaaatgttgtgagtttctgctctgtggtgggtactactcaaggttttggggtgcagcagcaagaacaacacatttgagatttcttgcctctgttgagccctcattgaataggcaagacaaatgagcaaagtcatctcatctccagatagtaagaaatgctaaatgagaaaaaattagtaggagagtaaggaggcctggtaggaattataggcagacagtgaaaatgtgagtatctggagaggagcattccaggaagaggagaccagagtcaggcttgtaaggccagggcacattctgtatgctcagataggaacaagactgaggtggttgaagcagaaggggaggaggatggtaagaggtaaagtcggagaagcaacaagaatattctcaaccatacaaagaaccaagcaggaacaatctagatattcacagaaagaatgtaggcaccagcccctttttattctgttcccaggctaataaaataggaattagaaccaaataccacatgtcctcactcataagtgggagttgaagaatgagaacacatggacacagggaggggaacatcacacagtggggcgtgtcaggggagggagagcattaggacaaatacctaatgcatgcggggcttaaaacccggatgatgggttgatgggtgcagcaaaccaccatggcacatgtatacctatgtaacaaacctgcacattctgcacatgtattccagaacttaaagtaaaataaaataataacataaaataggaattagaaactatgtttatgactcttaacccctggtcttaaacatctagctttttggttttgtttgtgttaatatgtatggatataagtatctgcatgcatgttatatatgcggggatattcagcactagtgaaatatgatgcattaaagaaattatgacttcatcgctaagccccacgtaaatatattttcagtgtttaatggctatttttcccaaactcagtttcatgattacatttcactgaagctaacatgtaactgttaggctaggcacagtggctcacacctgtaatcccagcactttgggaggccaaggtgggcagatcacctaaagtcaggagcttgagagcagcctggccaacatggtgaaaccccatctctactaaaaatacaaaaattagctgggcgtggtggcgaatgcctgtagtcccagctactcaagaggctgaggcccaagaatcacctgaacccagaggcggaggttgcagtgagccaagatcacactgctgcactccagcctgggtgacagagcgagatgctatgtcaaaaaataaaaaatacataaagtaaaataaaatgtaattgtttacagactataccatcattattctacgatcctctaagaaagaaaaaaatacttctggttaacctgaaacatgctatcaaacacatattagaatatcaggaatgtttcaaaatttgaaaacttatctatcacagaataaataaaatccagggcatttatcccctctcctgatgcataaaatgcacaaacttcgacttattttgaaacactggtttgtgcaaacttacaagttaactttcattcaaagcaaaacattgtcttttatttccttttccttgggcccacttgctgagaggcaagatgcttttattcctgcttttattagcagaagttgttgtcgtagtagtcgcaacggagttagaagtgagtatcatagtgatagtatttgtcatatgtttatggagtatttactgtgtatgctgttgtatctctgcctattggctctgcctgacctcgctccaccatgtaaacttaaaaccagatgagataattcagcaacaaacagcatgtcaagtagcttctagcttattagcagaacctccagattcagtttcttaaatttttctcatgtggcctatacctaagtgtaccaccagtggtagcgtgttagcctcaaattgtaagctcatggtgatagacagttctacaaagctttttgctgtaacggtaaatactgttcattgcttgcctattattaggcccacatcgaagcgcttcatgagcatttatgcctcagaactacactaggaggtagatcgaatgattatgatttccagatcacagagaggaaactaaagcacagagaggttgggttacttgccaacgacaaaaacccagggaaacaacctgcctctgtgatgtcccactggcattgtggccagcacttctgcactctccatcacacgctttgtgctggctcttttaggacaatcaggttgttgatcagaacatacacacgtctgggttagcaaagattatttgcttggctaaatgttatttaggctcctagaccctctccttcatcagtctgtgcacttccttgtaaaacacagctgcagaaaagaaccctgcaaagtcagtttacgaagaactcctcacgctctatacctcatcatcctggatatctgattaggctccacctcctccaccatcccccagatgacgtttggtccccctggcctgtcttcagcaagaatctcgtttggtctgtttagttagaatcgccatgacccctgctgtttcctcttagtaactttccatccactgaccccccaccctgttcctgggctataaattcccatttgccaggatatatttggaattgagccagttctaccctagacctttttccctattgtgagagtccttcataaaatctgtttttaccccattaactactatccagctatggtttttctttgacgatatctgctagttcaccctgtcgcatttagtgcagtaatgagcacgctacagcggttactggctccattctctatgcctaaaaattcatgaggggctgggagcagtggttcacgcctgtaatctcagcactttgggagaccaaggtgggcagattacttgaggtcaggagtttgagagcagcctggccaacatggtgaaaccccatctctactaaaaatacaaaaattagccacgggcacctgtaatcccagctactcgggaggctgaggcaggaacatttcttgaacccaggagacagaggttgcagtgagccgagatcacaccactgcactccagcctgggtgacagagggtgactctgtctcaaaaaataaaaataaaataaaataaatcatgaggccacgcagctaatattgatgtcgatattcacacttgttttgcttgcaacctcagtgattttactggtctaagatgataagatttttaaatttcattttcacctaggataccaatcagaaagagtctgttcttttggtgtcttttaaaaaatattcatgacacatcatgttggcaagtcaagacattgaagcagcccagtcaagttgtgcacccaggtgagatggaaaatgtgaatgaaaaatcagagcatcttttctccccagtactgcctctgaactgaccacacacagcatagttcacaggccacccagctgtcccttaagtctcccttatgagacagtaagagtcttcttccgaggtcccgacaggctcaaattctttgttcaaattcttttctcagaatggtttgggatttgttgcgcttagtggcaacgcttctgtgatcttccagaaaggaagaatacccataaattaaaacaccaccagcatcaattccaacacttctggatcctctaatcacctaggcaaaacataaaaaataaaaaccttgttttgctttctctcctctcggccctcgtctgccacatcttcaatggctgtaagtccgagcctgtctaagccttaactggctgagtgttaactcatccagtgagttcaaaagagacggacacagcaaggcacacagagatgccagtgtcacagtggaaccagtctaggagagctcaggcttacagctggcagctcctgaggtcgccctggaggaaacactgaaacaaaatgaccctgtggctcctggctactgacaagtctttggcctaatttatttgagtagttcagaaaaaacagaattttttggaatttccaaggcatatgcatcaggttggtgtgggaccacactcttaaaccttcaaagttttccaggaaatgcattgtagaaactggatctgactctgcttcgtccttgatgttgatggatgccagtggtgaagcaatgtctgtccttgtcactaagcaatgcattcctctccagtagtgttctcatttcacccgttattttagatgtctttgaaactatacaaattttattttccctaatatgtactgaaactcattgactgacacacttaatttttctaatctgatcaatatttggttaattgaatgaatagacaatctgtttaaagacagaatttgtactatttccttcattgtctattcttcctccttacccatcgcccctcctattcaataatagttattttttctggatcccatggaactcaagtcaggctgatgaaactggttttgggtcctaaatttgccacttatcctgcgtgaggcctttcagaagttttctcctctaagtatctattcctcacacataaaataagagtagtaacctacctaactcagaggttcttgttgtaattaaatgagaaaattaaatgaagcaagtatcagagtgctcaaaacagcataaacatctaataagtgttagctcttatcaccacctcccctttcataaatttaaaagaaagctaatgaatttttgccaatcctggaaagctatcatccttttaaagtatgcattttataatttaaaataaaaactcttaaaattatgctcttctctggaaacatcccaatcaaccaactttgccaatgtataaataaacagtatgggtcaccccacaatttagaattggatggttttcctgggtctgtgctgtctctcctttttcccataccaacatctctgctggatgtaaagtccatgaaggaaattgttttatgggcccgcaagtctgctcaatacgcagaacacaataacggcagcacccagctggctgagggctgaggatgtggtcttatcagccgtggagtttggctaaggcagaaaacagagagccattctccttcaataaacaggagacagctggagtcccccagctcctcttcttaaggagactttaacaacccctcagccatgtcttcatgtacggatagggcatgtatctgaagactggtgaccagaacttgggggaaggtggggggacaataaaacatgccgtatttggtagaaattaagataaggaaatactttttttaaaaaaaacaaaacccataatgtattccttttctactcatttcctagttactctccagcttctggaatgaaggtgcagtgctggacagagtaagattctgcaagctcctgctgccatcagaagctccgtaagtaccgcatttactgagagagggcagcttcaaaggtttcatttccacttagagtctaagcagctctacaaaagagcattgattttggttaaattgatttcattcatagttggtttggatggtgtattcaaaagatagatcgtatcagactgccagtgtacaggagtctggggggacagacctcctcttgtgtgtgcacatgtgggcctaaatatttcctcttctcacaggtgggtgggatttcgcctttgaggggcctgaaaagacattttcacaggatgggccactctggacaggcatgttacactgcaatttgggttatgtcaaaagcataaaatcaggcttttcaatattgcttctaactgcctgtgcagcaaatacccatttgtcttattacttcatattaatgcacattagctattgaccctactttagttgaaatatataataacagacagatgtgccaagtgccaaccggttattagaaactcgagtttgattccgtgggttccaggtggtggctgccatggaaaatacctgcgtgactatttcaaacatacgagtaggcatgagtgttcatgatcactgtatttgactgcaaacctcaagcaggatggcatttgaaaagcatataatatccgaaaccatagtatcgaacagcagaagtcttctgctgaaaaatattcaagattacacatgtgggaacacgcaacacatgcggtttcatattaacaaatgccatcaactttcaattattcattcaaatgaaaggcagctgctagtttaaaaaaataaaaaatacagatacaagatttcaaactcatttaaagatggctgatggccataggctgcaacctatggtctttcttactcagcatttgaatctacttatctatgctctgttctgatcaatattaaaattggtttcattctctaagcagccactgactgatggtaattgggcagagatgaattaaaggtaggtgtctggagacctcagtgtgagattaaaaacatatcatggttggattatacagatatacatgcacatcccgcacacaaacacataatacatatgttttaatgccatttttcagaagtattcttttcaactgggatatgcaaacaaatcgtctggcgatctttttcaaacacaaatgcttaggtcccaccatccaaataagttgaattaacaagactggggtgggccccagccaatggatttttaataagttaaacccatgccagttgattctgagcactgcttcaactactgcattaaagatcagaacaaccacaaaaaaaaagactgggttttaggcacttgaggaagagccttcagccttccccaagacatataaatgctaccaccaatgacccaattgttaaaactgacaatataggagtatcccttgattacacattttcgcatccaatccgccacccaaggccctggttctatctccaaaacccttctcaatatgtccagtttttagttcaagctgtcatctccccacctaccctgctgcttttttcctggaaattagcatggtgccagacacatgatatctgcccgacaaatattagttgaaagaatgaacaaacaactgagcaattaggaattgtgtatttttcaacatctacttgcacaagacctggtatatacaaaattgagttaatactaacagacattaaattgaaaagaatgctgttaatatatctaagtgtagggtacaggacacgagtcagactgaatctcagggagaagaaacagcccaccagcacgttgaccaccactagtactcagggatctggatacctgtggtccaagctcatgccatctcctgtttcactcctacccacagtggacaagctgggggaaggcatgtgccagagcaaaaccagcttcacagtccacatgagggtatctggtggcaaaacatcaattatcacctcctcatctgagaagcagaagattggatttctggagagtctccacagcccacttgtgttctgttcaattctaatgcttatgtaaaacaccctcacataggacaaaggtgatgaaatcactgcttggaatgaaacaaatctgaatgtaaatggaaaaataatatggttagaactgaagagtcagacactatataaataggctttgcaaattaacaagcacccgaaaggcacccagagaaaagcagctgtcctgaccaccaaggaaggaaatgcttcagcactgaggacagttcttgtgggtcatgctattggtggtgttcagtccgtgcccagagttcagaagctggagctaaaggcaactgacagaactgacccatctccaagtgggctgaggcatccactaggccaccaggcaggagaagtgaatatcacagtccaggtatcgcagagtattgtaggcttgagatgcataaagagattctgggagaaaacaaaggaggggacaaaataaagaacggagtggccactaaggggccatcctggtaaggtggggcatgctcccacatcccagtttcccccaaacttcatttatgccctctccgtgctcccaacagggacacaaattaaggcaagttggcttggtctctccaattcagttaaaatgtttattgtttgttgtccaggattctaaatcactcagaagggaggttatttgttctctcaagttctccattacccctgtgggggcttgggagagagctttgaactgagaaaaagccctggcagtaattaaatacaaaaggcctccctgtgcctccccacattcggagttggcagccggctccagccaagcagaagggggaagatttgattttaatcacactgatttcatattttattttgctcattaaaattcctgataaggattttcttcagcattctgtggttctccctgaatatttgaagagggtcttttagaatattttctcttttcatggcaaatgttgtctgatccctgcctgctccatggtctgaaaagattgtctccaccttgctcaaatccaagatgtgagaagtttctgagagaaagagaaaaaaaaattttcgggatggcatgccaccactctgtaattacagccatgctgcctctgctcagcccaagtgaaaaaatcaattatctaagaatgcaggcctggaatcaagatgaagaaaaactttgctctctgaagttgtctagaacgtctaggaaaaaacggaattctgggtctgtataaaaccatactgctggggagggaagaaaatcctttttagaagcaactgctaagacgcctacgggcctctgtgccccaggtgggctgtctctctgagggcagtgggacctccggcctcagttacagggcagcgggggcaggccttgttcctctgctatgggcagggctaaattgtcaccaatcaggcacaaatttgaaagaggctgagaatgttttattcttcaaaaggacatcaatgccaatactttcttgcccacagagaatctaattttagtgtagagatgtataaatatatattcatatgtgtgtgtgtagatatatgttctatatatagaattagagctatagtattatagctatacagaatagtatatagtattatagatatattctatatatgtatattctacatatagtatcattatatactctccatctgtacctctctgcatccttgaatctctttgactgcatctatgatgaggatttgcaagtaccacgttctatattctgggttctctggatgaagcctgtcctcctggagaggggaggggagacgaaggtcttggcctcagtccttggcagtggtgaagggccccgtgggctgagccacgtcactagactcccttcctaatggaagctctggtatgaaaagcccagtacattctcactgtgcactgcttcagacgtgctgtattctgatagcgaatgcgagaagttctgatttggcataaatatgtatcaaagcattcttttttggcctcttcgtttacccataaaatattagattgccggatggcattatttggggtgctcattcccagcctcccttatgtgctcaaacacctacaaaattactccaattgttgctagcttgttaacttcaactagcaagtggaaacaatttaccttttgtcattttactccaacaaaactctattcccactgaagtaattttaacgcctatcaaaatgcagaaacaaccaaaaaacagagagattatatatatatgtttgtgcatatatgtgcttgtatatgtagacatatatatcccacttttagtagattagaatatatataaattgtaattctattaataggcaataaatgatgatgacgttttaagatgtcctaagaacccattatcaggaaatctgatcaagttactctaggcaggagggatgactacttgccaagatgagcagcctgttttctatgttcaaagtgctcatatgggagaaaactaggaattagagaatgagaaagacatgtccttaatcgacctctacagagctcatctgggaagaaagtgggtcccttctttcctgcaatgcggccctctgttctggactccacctcaagcattttgtcctcttcagtcttttgtgtgctaatgctgtttcctaaagaacaaactcttgtccatcacaatagaacggaaggccttgctcttgtctgaagctgtgcactcccacttcctgcaatctctttacttagcagcaaattttccttcattaaaattaagcctcatttcttgctcatcttttcctgtttttctcagcaaaactgagtgcaatcctgaacctgtttttcttgctgctttattttcttgtcagttcataactgagtcctctttccctccaaaaacaattgagagctttattccacccgattttgcctctcctttgtgtgggaaacaagaagaagagaagatgaggagtgtgggtgtgtgtatgtggggtgtgtgtatgtgtgtgggggtgtgggtgtgtgtgggggtgtgggtatgtataagtgtgtggggggagtgggtgtgtgtatgtgtgtgtgggggtgggggtgtatgtgtttgggggtgtgggtatgtataagtgtgtggaaacagtgggtgtggatatgcatgtgtgtgggtgcgtgtatgtgtgtgtatgtgtgtgtggggtgtgtgtgtatgtgtatgagggggtgtgggtgtgtgtatgtgtgggagtgtgggtatgtgtaagtgtgtggggggagtgggtgtgggtatatgtgtgtgtggggtgtcggtgtgtgtatgtgggtgttgggttgtgggtatatgtgtgtacagagtgtgggtgggtgtatgtgggtgttggggagtgtgggtgtatgtgtgtgggtgggggtgggggtgtgagtatgggtgtgtatattgtgtagtggggtgtgggtgtagggggtatataagtgggggaggtgtaggtgagggtgtgtggggcagtgagtgtgtggatgtggatgtggggtgtgggtgtgtgtacatttgtgggtgggggttgtgggtgtatgattgtgtgtatattgtgtagtgacgtgtgggtgtggggggtgtataagtgagggaggtgtgggtgagggtgtgtggggcggcgagtgtgtgtgtggggcgtgggtggggtgtgtgtatgaggtggggtatgtggtggtgtgtgtatgtgggtgagggggtgtgggtgtatggggagggtgtgtgtatgtgggtgtgggtgcgtgtatgtgtgtgtggggtgtgggtgggatgtgtgcacgagatggggtatgtggtggtgtgtgtatgtggggggagggtgtgggtgtgtggggagggtgagtgtgtgtatgtgggtgtgggtgtgtgtagtgtgtgtgggatgtgggtggggtgtgtgtatgagggggtatgtgggtatgtgtgtatgtgggcgggggatatgtggtgtgtgagttgttagcaggtgaggggttaggaagtgtttttcctaaatgtccaggatgtactagaaggatccatttgtatattttggcaccaggtttttgtgcagactctaggattactgcttgtgtttcagtgtatttacgctcattgcagagatagtgtggccttatatatccatctggagtgtcaactgctcgaggtaattctctagggtcagattcctagacagggaggtaacagaaaaaaatcgtggaattagcattggattctctgaaacagcagatctcaagcttcgataaatctgcccctccttaaggctatctgcccatctctttagtttatgctcattttcccttcttctctcaatcaggttatctacctaacttctgtttaaggaccaacatagatacatggaattctatagacctaaactttcataattgccagattctctgagcagcactgaagcctccacttcctttgataggcagagacatagaatgactgttcaatgttccctggtatgttggggttgcagcagagttcggggaccctgggtacagctactactcggaggccaagtaaaggggagtccacctaagcctggaatcatgtgcaccagggttctgatcaaactgacaaggtgctcgcactgtaaatatgagttttgagaagacacttggaggtattcagagacaaagctgcagagaacactatacgggtttggtggctattttagatattcttcagtttccgtttgactttcttaactcctatgcttactaaaaacctaggcactcattaaaagacggctaaaaactgaaaactagctaggtgaccttgggcaaattacttctatgcctcatctataaaacagaataatgatattataaaccttgtgggtgtgttttaattttttttttttttttttgagatgaagtcttgctctgtcacccaggctggagtgcagtgacatgatctcggctcactgcaacctccgccttccaaggtcaagcgattctcctgcctcagcctcccaagtagctgggattacaggtgcctgccatcatgcccagctgatttttgcatttttagtagagatggggttttgccatgttggccagcgtggtctcgaactcctgacctcaggtgatccacctgcctcggcctcccaatgggctgggattacaggcatgagccactgtgcccagccttaaagattaattgatataatcagagtaaaatgcatagcacaattcctggcatatagtaatgcaatactcaaaacctcagttttcatcattatcattagaaaagcatacagcagttaccaagtgctgggcactttactaaatattgaggacacaaaggcaaataagaaacggcccctatcctcgactagctcacaatctaaaaaatgttttgatgggacatatctcaaaataataagagctatctatgacaaacccacagccaatatcatactgaatgggcaaaaactggaagcattccctttgaaaactggcacaagacagggatgccctctctcacctctcctattcaacatagtgtcggaagttctggccagggcaatcaggcaggagaaggaaataaagggtattcaattaggaaaagaggaagtcaaattgtccctgtttgcagacgacatgattgtatatctagaaaaccccatcgtctcagcccaaaatcgcctcaagctgataagcaacttcagcaaagtctcaggatacaaaatcaatgtacaaaaatcacaagcattcttatacaccaataacagacaaacagagagccaaatcatgagtgaactcccattcacaattgcttcaaagagaataaaatatctaggaatccaacttacaagggatgtgaaggacctcttcaaggagaactacaaaccactgctcaaggaaataaaagaggatacaaacaaatggaagaacattccacgctcatgggtagggagaatcaatatcgtgagaatggccatactgcccaaggtaatttatagattcaatgccatccccatcaagctaccaatgactatcttcacagaattggaaaaaactactttaaagttcatatggcaccaaaaaagagcccacattgccaagtcaatcctaagccaaaagaacaaagctggaggcatcacgctacctgacttcaaactatactatgaggctacagtaaccaaaacagcatggtactgttaccaaaacagagatatagaccaatggaacagaacagagtcctcagaaataatgccgcatatctacaaccatctgatctttgacaaacctgacaaaaacaagcaatgaatggggaaaggattacctatttaataaatggttctgagaaaactggctagccatatgtagaaagctgaaactggatcccttccttacaccttatacaaaaattaattcaagatggattaaagacttaaatgttagacctaaaaccataaaaaacctagaagaaaacctaggcaataccattcaggacataggcatgggcaaggacttcatgtctaaaacaccaaaagcaatggcaacaaaagctaaaattgacaaatgagatctaattaaactaaagagcttctgcacagcaaaagaaactaccatcagagtgaacaggcaacctacagaatgggagaaaatttttgcaacctactcatctgacaaagggctaatatccagaatctacaatgaactcaagtttacaagaaaaaaacaaacaaccccatcaaaaagtgggcaaaggatatgaacagacacttctcaaaagaagacatttatgcagccaaaacaacacatgaaaaaatgctcatcatcactggccatcagagaaatgcaagtcaaaaccacaatgagataccatctcacaccacttagaatggtgatcattaaaaagtcaggaaacaacaggtgctggagaggatgtggagaaataggaacacttttacactgttggtgggactgtaaactagttcaaccaatgtggaagtcagtgtggcgattcctcagggatctagaactagaaataccatttgacccagccatcctattactgggtgtatacccaaaggattataaatcatgctgctataaagacacatgcacacgtatgtttattgcagcactattcacaatagcaaagacttggaaccaacccaaatgtccaacaacgatagactggattaagaaaatgtggcacatatacaccatggaatactatgcagccataaaaaatgatgagttcatgtcctttgtagggacatggatgaagctggaaaccatcattctcagcaaactattgcagggacaaaaaaccaaacaccagatgttctcactcataggtgggaattgaacaatgagaacacatggacacaggaaggggaacatcacacaccagggactgttgtggggtggggggagggcggaaggatagcataggagatatacctaatgctaaatgacgagttaatgggtgcagcacaccaacatggcacatgtatacatatgtaacaaacctgcacgttgtgcacatgtaccctaaaacttaaagtataataataataaaatttaaaaaaatgttctcatttgcacaattaagaggggtaaacttatttatattttcctcctttgttgtatgagacaaccgaagttcaaagaagttaataaaattgtttaatagttacacagctaatagtgggcaaagtcatgatttgaacccaagtccaagttattacaaagggtgtccctctatctgctttccaatacaattggtgtagataaagtgaggatccaggagtaaaactggaagagaaagggatttggtcactcatgagcctttgtgttgctctattattatagaaagttcaagaacgagcaggtgagatgaaagcagcagaccctgcaaggagtggccccgtagagtcagaactgaaaccaaaccccacttgcctgctggcctggtaagctggtaagttgcaaaaggaggaagaattggctgtgggctgtgacttgacccatgtcttagatccttaccagtatgggtgacaaggacagctgacatcaatcatgcaatgtaggctcccaccccagtcctctctactctggaggagtgtcgccatttccacagagaccacagggggatcagagccaccgtggctttagttacagcctttacttctaactggagttttcttatttctttctcattatttttaattttcaagtactaacaaaacaaaaacaaaaaacactcttttttaaaaagtatcactattgtttctaaatgtttagtttatgctgtgggtttagccttgtctcttaatcattggctttaagacttgtcaattacatactattttctaactcttgaccttttacctttattataactcaacctctattatttcaaaattctactttatttctatttgaaattttagcatttgtaaaacattaatcacatcttatccttctacctttccattattgcacataggccatctttcctttacttattttctaaatttttcctgtatttgatttacatttataaaaacctacagaaagtatggccatggtggctactttttccattaaaaaaatttctttttgcttaggattgccttggctatttgggctcttttttggttccatataaattttaaaatatttttttctagtttttgtgaagagtgtcattcgtagtttgataggagtagcatagaatctgtaaattgctttggaaagtatagtcatttgaacgataatgattcttcctatccatgagcatgggatgatttccatctgtgtcttctctgatttctttgagcaaggttttgtaattctcattgtagagacctatcatctccctagttagccatatttctagttattttattttatgtgtgtggcaattgtgaatgagattgcctttctgatttggctctcagtttggttgttggtggtgtacaggaatgccagtaatttttgcacattgattttgtatcctgcaactttgctgatgtttttaaccagctgaaggagcttcagctggctatggggttttctagctagagaatgatgtcatctggaacagagatagtttgagtttctctcttcctatttggatgccctttatttctttctcttgcctgaatgatttggctagcacttcccatactatgttgaatagaagtggtgagagaatagaagtggtgagagagggcattcttgtcttgtaatggttttcaagggcaatgcttccagcttttgcccattcagtaaaatgttggctgtgggtatgtcatagatggctcttattattttgaggtctgtttctttaatacctactttattgaaagtttttaacatgaagttaaaaactttatgttaaaataaatgggaaaaagccttttatgtatctactgaaatagtcatgtggtttttgtttttagttctgtttatctgatgaatcacattgattagttttcatatgttgaaccaaccttgcctgcggggatgaagtctacttgatcatggtggatttgctttttaatgtgttgctggatttggtttgcaagtattttattgagaacaaaactaaggaatcatgttacccgacttcaaacgatactacaagactacagtgacgcaaacagcatgctactggtacaaaaacaggcacacagaccaatggaacagaatagaaagcccagaagtaaagcagcatatccacaactatctaatcttttagtagtagtagtagtactagtagtagtagtagtagtagtagtatcttgagacagagtctcgttttgttacccgggttggagtgcaatggtgtgatctcagcacactgcaacctctgcctcccaggttcaagcgactcttctgcctcagcctcccaagcagctgggattacaggcacccaccaccatgcccagtacatttttgtatttttagtagagactgggtttcaccatgttgcccaggctggtctcaaactcctaacctcaggtgatccatccaccttggcctcccatagtgctgggattacaggcataacacaaccatctgatttttaacaaagctgacaaaaacaagcaatgggaaaaaaaaaactccctattcagtaaatggtgctaagataactagctagccatatgcagaagattgaagctggaccgcttccttacacgctacacaaaaatcaactcaagatgaattaaaggcttacatgtaaacccaaaactataaaaactctggaagataacttaggcaatgccatcctagacaggaatgagcaaagatttcatgataaagacatcaaagtcaattgcaacaaagcaaaaattgacaaatgggatctaattaaacttaagagctgctgtgcagcgaaagaaactatcaacagagtaaacagaaaacctacagaaagggagaacatatttgcaaactatgcatctgataaaggtctagtatccagcatctataaggaacttaaacaaatttacaagagaaaaacaaaaaaccccattgaaaagtgggcaaaggacatgaacagacacttctcaaaagaagacatatatgtgtccaacaagcatttaaaaaaaaagttcaatatcactgatcattagagaaatgcaaatcaaaaccacagtgagatactatttcacaccagtcagaatggctgtttataataagttaaaaaataacagatgctggtgaggttgtggagaaaagggaacccttacacactgttagtgggaatataaattagttcaactgttgtggaaagcagtacagtgattcttcaaagacctaaaagcagaactaccattcaacccagcaatcccattactgggtatatacccagaggaatataaagcattctacaataaagacacatgcacacaaatattcattgcagcactcttcaaacagcaaagacgtggaatcaacctaaatgcccatcaatgacagatacggataaagaaaatgtggtacatatacaccatggaatattatgcagcagtgaaaaaaaagaacaagatcatgtcttttgcaggaacatggataaagctggaggctatcatccttagcaaactaactcaggaacagaaaatcaaatacagcatgttctcacttatagtgagagctaaatgatgagaactcatgaacaaaaagaaggaaacagcagacactggggtctacttgatggggagggtgggaggaaggagaggaaaagaaaagataactattgggtactgagcttaacacctgggtgatgtaataatatgtacaacaacccccatgacatgtgtttatctttgtaacaaaccttcacatggacttccaaacctaaaatgaaagtttttttaaaaggaaaaaacactttaacccattggcctcttttcagatgttagggtccagaacaagcagaccgagccctgctcccatagagtgtaccagtgagtgagagccaagagccccataatcaatggactttggtgaggattaacttgcaatcttctggatctccatgggagagggtttgtagaggccattggccagtctggggcggcctttgggtagggcatgagaggggcaacaggaataagcccattgatgatgtgctgtctctgctcttacctactggtgcgctccatggaagcagagctcagtctgtggctggaccctaaatctgaaacacattaaatggatgcatgtttcaacttgaactgttgacatgttgggctggctactttgccgggggctgtcccatgcctgtgtttagccacagccctgaactttgctctctacatgtcattagcaactccctttcagacattgtaaaatgtccccttggcaacaaaatcacctctggttgagaacctcagctttaatccttacaaccatctttcatgatgggcaaggctgccgttcttactcttcattttataataaaggaagctcaggctgaaaggctgtgatttccccaaagtcatacagaatggcagaatggtccaggtgactagatttcctaactccaaatccagttctcatttcaacacatgtcagcacttcgtacctgacaagtggccggcagattgtcttcagaacaagacaaggcggacttcaatttacagtgtgggccctggactgcgtcacccctggaggctgcatccatgaagtcagcgcctctcctggtgaggctgctgctggtgtaggcaaactcggtgggctatgatattacatagattaaaggagggaaagcatcctcagcctccctaaaattgttttcaatgatggcctctggactagaggataagttgactttcaatcagaaaaacagttaattcaacactggaatcgcctcctccaagtctttgacatcatcctcactctcattccaaatctccttaagacagtgtgtcttggacaattaaccgggcgaggatgcagcaaaactgacccagctgtatggattaagagaggaggtgcaggctactggcaagtgtagctcccaagaatcaaactgataacccgttgaggtccaagcaggaagctggttgtaggagttgttcactgcaggctcagggtgtcctaccaaccacagagaacaacagtgatgggagtcctgaaagaaaggagtctccatctaggggctctgtttgcaagtagcaggacacagccacatgtagagtccaattcctgaaaggaggaaccaataaagcatgccaggatgcctatcccaggatgaaactagagggccaggttaggaaatggaatcaatatcattaaagaagtggacttcagaacaaaggtgagggctgtctcatggccaaggtacccaatcaaagttatgtaaaaaagtgaaggccgcatgatacagagctcacagcgtgcaggacaagaactggtaatactaatcccttctgtctcagagcagcgttggtcttgggatctgggggataaatgaaggagatccactaggtatgagactcagaggccaggagccaaacaggttttaggaaaacactttagcctctttgggtctcacagaattatagattccactaatgggaaaaaaaaaagacaaactcaagtagtaggatctagtggctaagaatttggaatctaggaccagacaaatctaggttaaagtttgtatattgaataagtgtattgccattgatatataatgtctctaagacatagtagcattgcttttaagatggaagtcaatatagaatcccttttataggattgagaaatttaaatgagacaagaaatagaaatgtcccagtgcctgaaatacaatagaaattcattcagtgttagtttaaaagaaatcaatttcccccagcctcaactgagcatttcacttggagtgagaggaataaaaaggatgggcagattgctgttgctatcagaggttctacttttagtgaatgtccttgctcttagcatctctctttccttacttccttacacccccatttgttatgaaaagaatgaggacttcttcctccccatttttgtgatacccagggattttctacagatggaaatatttaacattctccagaagctcaagggcaggcttcaagttagcacagctatacctggattctgatgtggagacaaattgctacttcattatagaaccagtgagaagcatccaattttgaaggctgttaaatttgcaagggcagcaaagaaccaaatgaatataaaatgcagaatggcctcacacaggcacagcatcttatcttagaggcaaaagagaagcgcgcaacccctcatgccctggaaagatgttttatgacagtaaaaatagttggggtaagtctatgctatttagatatgataagcaagacatgaaatgtcagtaattctgtttcttttcctaaggcaagagatgccaaggagtcagccaccattttgagagaatctctgaacacctgtcacctgtgcagacctctctgtaaagcttagagacagagactcccttagtctctaaatactaccacccactggcccactcacctacagtgctgctattgatcaatatgcagtcaacagatgtctggtcttgcaaggcaggaggaacaatcgcccagttgcctggggaaccacggacttccatggaagtctcgcaggatccgctgcagggccagtaacaacagagactgcaagctcaggtggcctcagctcttgcccctttttgtggatttctgagctatctggggaagtcagcaaccactttagtgcctttacctgctgctgtgggaagaagccttacatactgtacagtcagttgacttctgaggaagagactcctcatatctatcaattctcactccttacctcaccagggcacttttacagcagacttcatcaaaacttccatgtaaaaatggcctccaaatagaactcaaagtaagaatacctgggctaggtttcaactcagggtgaaatctggtgcacagaaacccttaaaattgctatagaattttgcaaacgttgagcttaaataaaaaggagatgatgttacagcagtacaagatgatatgaatattacagctgaattctgaaattgggggctcacacactgatccccaccactcatttccaagtggtttctgtctcctgcttgggagggctttcagctcccgtgcccagccctgctacctgtggaagccacagggccgtcctgtgttgggcacaacacaagaaaccctgtggctcacaaagcctctgactcatccgttatgggggaagggggctttgttacattctctgttttccatcagcttagctcctgtttctacagaatcaaaagatgactgccagaggaaaaggagtttgttttcttccattgaatgcaattgtttcaatgacagcctgtgagtgctgcaatcttgcaggcctcagacacttaattcatctcagaggtgatatcaaaaacagcacagcaggcacttacccgccactggctctcttgctacaaaagcaagcacctgtttcatcatcctgggccctggtgactgacccaggtgggcgatgccatattgactggggcggggtgaagggatgtgccacagctgtctgggataccatgctgcagacgaaagggaattaaggtggagggggtgtgctggccagctctgaggctctgctgccttgttcctgagctttagctttgccttcctctcctataaagagggccaacagcgaaactgcccaccactggcccttccggccagccaatgtgctgcagactactctgcactggacttaccacaaaaaggctcagaaggcaacatttgccactctgttagggctgaagtctctagggcgggttgaaatgatggagagaaagctcaaaaaggtgcctcattctagcctgccaaagagaaaattggaatttccccaaccatccctataatctttggtttgatagagatagctctggaaaggagtgtgtctgctagggaaaagctttgcccacgcaccaggaactggcctggccagcagtgtgaggaatcctgtgtatcctccacatgtgagacttaaagctgggaagagatgttcaaagagctggcttttctcaagacaggggttgctaatttctttctcaaataaatctgagattcttcccatcatccctgttcctgttgtccctgcccaggtgcaaggactgagcgtgtccagctgacaatgttcctattgtctctcacctggtgagacccacctgtcacaccagcatcaggatacatttcaaaatacaacttttatctcctactcccgcattaagctattaatacaactctactcgattatctgtttatctgtgatgtgcttccactcttatcagcaaaatatgattttattattaataaaaatgactattgagttctttaatatatgctaggcatttcattataactttgcattgtattaattcacacaattcccataacagccttctgaattaggtgttattaccttctccaatttaaagatgaaaaagcttgagactcagaggttatggaatttgccaaggtcacacagctagtgagtgtgggagccatgatttgaaaccggggtttgttcccatagcccatgctcttagccactcacctctccacgtggcagggagggctgcccactgtttcccccaaacacagtcttttcactatagcttcctctgagccaaggaagcttccattctacccaggccagcctcatcatggtctagtaaaacaaacgatgctcagatttaccctttcttccatctggcctgctctgccttccccttctttgaatcttagccactcctcaaaagccggctgaagtccagcccgctgctctgcagtggtctctagagggccaagcctacccttgtctcctggacctcatggcacataatcacacatcactgtgtgctgggctcctgttgttctaggtccatgacctaccttgttatgaaagactatgagtcatttcagagagacaaaagtgtaattttattttgtagccctcgtagaatcttgccaatactcagaacataacaaaagcccaattgaattagatcagcatagtacatggctcctgagaacatcgcaacccccaagtctcacaaaaatcctgtaaaagaaaatgaacaagttggccatagtctcctgtgcctttagtgccacaccacactgactcaaaccatgcatctctgctttctggaatctttggtgccccatttgtatctagaaaaaaaatgtttccttttctaactctgaagaatatgcagctgtgccactaaatgctgcctttgtctacatggcagtgagaactctgtggattgcagtaggacatcacctctgaccctgctgcccctgggccttgtctgaaggcactggtctctgagtgtacaagaaatagaaccttggaatcaacttccaggctccaaagagtgtcctttgactctccgggtaatccggcagtatgcagtggaatgctgaccagttgtgattagaaatgcacttcccagtttcaacaccagcctattcatcttagagtaggtgtggaatcgatggcaaagtggtagactcaaaagactgttccaccttgaattcatctacagtctttcaagcctgtacttttccccacctcctctttttattaatagctgatccctatataactattctagcccacaaattaacaccgtgtgtgtgtataaaagcttgtatatttccctctacctgttctttatattaatagctgatctctatataactactctagcccacaaattaagactctctctgtgtgtgtgtgtgtgtgtgtgtgtgtgtgtgtgtgtgtgtaagagcttttacatttccctctacctcttctttttattaatagccattctcggtataactactttagcccgtgaattaagaatgtgtatgtgtgtgtgtgtgtgctaggtagagagaggcttaagtgtatgtataagaaaatgtataattcctaagcacctgtttctgtgacgaagggggaaaaataatgaaattaaaggcttttgtaattgctgctccctctatcaagaatagtcttctctgcaagggccacatagctcctgttctccttcttgcctgtctctgttgaataccagtgttaaaaagatgcgaccctgacacttcctgcaaattagcactcccatcactgcctatcccccttcttctcttcttcttcacagcacagatacctgacactaggtgtgtatttattaactcatagctctgtcctcatgcacacacccagctgcgagcttcttgtgggactctgtcaattccattcattcctgaatcccccatacctagaaccctgcctgcctgtacatcatgggtgctcaataaatagtcaaccaaaaaatgttaagcatatgggtgaattctaatgaacaaaaaatgaaaaaaggtcttgatctaattccagttcaatattagcaaactctggaacttcaaaataggacttaatttctgtgagtctcagccttctcatgtgtcaaatgaggtgcctcgaccagatagacaacttattcctggacatttctaagtttccttgagtcgccttgacatggacaagtgatgcaggagctcctaccctttgactgactttcaggtgcccttgggtgatgctgttttccctccacccatgaagtcaaggtgaaaacacaatgctcagctgaataccctacaggaagatttgcctgggtgcatgcttgtaggcaatcccaaaatgtttccttttgttttgcaggaggaagagaaatcagtctcccttaaaatgcttttgcagcagttggcctggcacagtggctcacgcctgtaatcccagcactttgggaggccaaggcaggtggatcacctgaggtcaggagttcaagaccaccctggccaacatggcaaaaccccatctctactaaaactacaaaaattagccgggcttagtggtggcacctgtaatcccagctactcgggaggctgaggcaggagaatagcttgaacttgggaggtggaggttgcagtgagccgagatcgcgccattgcactccagcctgggcgaaagaataagactccattttggggaaaaaaaaaagcctttgcagcattactcctgtgaatcggaaccaggaattaataacatcgagcctgaaggaacagcactctttcttgagtcccacagaggaggactcgacagaagttgtctgaactctgtttagggagaaagcaaaatgtgtttctaggggaggcaggaagacagctttgaggcttccatgtgatatctcccggctaggcattagcttcctcagtcatcagaactaatcatggcagttttgcagtgctcctttcaaccatccctagaggcctccatctttcagagactcccagggggaagagaactaacacactagaaatagctgtgcttttgacgtaaagcacactagcaaacagggctaagatggatcacaatgccaagcatgaccatcactccatgagcacaggaaacaccgcgccccgcactcatggttatgcaacgcaacaacttgatagagtgccgctgtctctgtactagaaatcgaaggcgatctgctcctacctgtacatagagcagggaaaatcactttcaactcattgagaggcttcaacagcagaaagattgatcaaagtgatgaggagcaaatctccctgccgcctactgatgccagacacataaacaaggcgggctgcaagtcatccctccagagggacccgtgcggaggttgggtggaatatgtgtgactagtgaagcgtgtgaagagggagggcgaagagtggcagtctacaggcagcggacagctccagtctcctgccctgtgtttgcaaaaacagaagactcaggtggagtctcctgcagctgagctggcccaggctcaggacaatgctggcttccgagaaggccgtttgggacatagagggagcaagaacctggagctaaatttggtctggagcagactctcatggtaccttaggccttcatggagactttgctgagaattactcattttggagactcatgaggaagaggtgatagatttcttttctttggaaacagggtcttgctttaacacccacactgcagtgcagtggcacaatcatagctcgctgcaacctttgaacatctccctacattttttaaatttttatagagatggagtttcacccaggctggccttgacctcctagcctcaaacaatcctcccagctgggcctcccaaatcactgggattacaggcatgagccactgtgacacaccatgatggatttctgaaagccaccattacaagagagtaacaaagtccaagttctctccagcaaggttcaggatggtcttaagagagagagaagtggcatgctcatggtgtagtcacccgcccctaatcactccgtgactcgggggttctttgtgttgcccatcctcacagggcctacgtcactctttaactatggggctgacacttgtcatctttccatctacccatgtcactcccaaatctccctcattagataaaaaattaattttgttaattaaagcaatggaaatcaattaaccttatcaggcaacatggcctactgaaacagagccaagccttatattgcaatttccttctgcctgagatcagagatagaaccacacaatttgactctcagagggggcgttttcaaccctgggagtgagagggaactttttttctctagggttagagaaggttctaaactattcacaaccaggttatttacttcaacacaatgagcattagaattacattttaccaacatctaaagattccattaatttcttttcagctgtctacctagcactgtaatggatttaataccaatcatggatacttaaaataaaattcaatcactttacaaatgggaaaaaagaggcctgacacagggtggcttgtgggtttctcccttctcttctcctgtaccacatcttcccaaaatagcctaaaattttatcccttttataaatatctctgtacaatttaaacacagtcattattttactttaaaaaaagcgctataaatgcaaaggctgaagtctcctccgcaaagtccctgcagttttctcagtttattctgaactaattgccagagcagcctgtgatgaaatccctaatagcctttatgatgaaagattaaaccctgcgaggaaacacattgacaaggtgcgctgcagactctccactcccacccacttatgtggtgtagggtgagtgccctctccattcgtcataatccatcgggcaatcagcgtgctccctccctaacttccggtttagtcacactcacacaatagcagccctcactcctgctagaataagggacacgatctggccgccccaggtggtatttctccagctgagtcactgttgaataaatgaacccactgacagtctctctgagcttagccctgagagccaatgctgtctttgcgaaaagggtgcattacctactgctatagtcctggcacggcttccctccttaacctactcttggctacctaatgttcagaattacctttctctgacacactgaacattttaccccactgcccctctcccagccaaattggacaaatcctgttgcgttctgacattcaagacactccttccctcccatcttacggcatcacacccttgcttcccctgtgcattacaaactgctgctcactcttcttccttcacatgtggcatgctggccatggctcctgcaccaaaaacaactcaaggagccccacctcctacttctctctttttgagaaccccccacacttctatctcttgctgtatctaaatgtgacactctgcatttcaaaaattacagaaaaataggggtttgcttgtcattttctttaatgaaagtatgaaagagaagacctagctaaaagtaaaaccataaaatgatgccacctccatcatgacaacccctgcctcagcacctggagacatggtgtgtgtcctctttccctgaaaataatgtaccttcctgggaattgggacacctcttaggagcttgcaaagagacacagttaacaagtgaggaggacttgctagccacgtcacatgcggagattccctcaaacacatcagtgattacagccttaggctcttccttaccatcaccctctgcgtgacttccattacctctctttaaaatcaatcccgaccatcacattgatctcaaatcatatacaccagcccccctatatcaagcacagaggcctaaagtaacactctcattcctggaaacagtaaaatatcaagcagtgctgccatcgcatcaaagccaggtctgttttaaagaattcaggatttcttgatacaaaaaaatctcaggataggaagagatctatgggaaagtattcccactaggtgttcaaagggtagaaacaaaaattactttaaaaatgtggcagaggcagcagccaaatgtatttagaaaaacctggattaagctaaattaaatgaatttacttactgcttttaatatgaatcatgcatctcgaggaataaacacaatgtgtatatttcccaaacatatttatcttgccacccatcctttgtactgaataatcttacggcagtaatgttccatgaaacacactgcactagaatcatctagcctagtctttcattaaatgctagattcctgttcacaacatcacacttgggcttccccttgtttgtcttcactgtcagagaacgtattgcttgtgccattttcctaccacaatgttctttttttgcactaaaccaagatgtgctgctttgtaacttccttctggtacttttggatttgactagggccgtagagagcaaatttaatcgatcttcagatccgtgaagaaagagctcttctggttcttctagtggtatcttctaggctcaagcccacccaggccttcattaattgctctgatgacatttcacactgtaacattagcctggtcctttctgtctgatacacttcaattctcaatattcctcttaaggtgtggtggctgcaatgaacacaggcactctagatttcgtctaatcaatagaacctaaagcaggactattactttcttagctctggtcgctaatacaccaatcagaagccagaagattttactagaataacctagaattttatctgcattagtgtagttcttcatcaaagttgaggttgtttaggtttatccagattgacaagattttgttatttctacaaaaatgatgaccttagtgttaagatcctgataatttggcatacactcttaatgagaattagactatgatttaaatccccttcactataatggactttagttgtcaacgttaccattgtcctgggcaagaggtcggagtccctaatgggagttagcgagtctggctcagattcattcctccttcatccccaggcagtgcagcatccctgaatgccaagcgggatgctcaagtcagccaaatccctcctgtcaaataagcttcagcatgtgagaggcaattcctgttattttgctgggtaatttttgctttcaaaagcagaagagagaacagaggccaatatcgagagatgtgaatgctactaggggactacagaagaatagaaatgcaaatgcaaattttgaaatgtaccctactgaatagttcactgaaaatatgaaggcatataggaggtaatgcagtcaccaggtgtctggtctctgcaggaccacatcagcttttagaatagccagcatagattagacaggcacttgaagcatatccattttcaagtaagctttaaagaaaattcaagacaaaatggtggcagtggaaagaatgtggaattagccatcagaaaacctgggttccaagcctcgttttaccacttgtttgattaattaatttaacctctctgaaaattcatctatataatcaaacttctggactagatgttagctatggggttttctgtgcatgtgtgtgtgtgttttgttttgttttgttgtttctgtgtgagttttttgttgttttgttttgatttgatgcggatcttctatagttcattataaaattccctactgaagactgactttcctgactcccaatagccttcaaaaaggacagtttcacattatcttaaaagggtaatgaatggtgtgcatagtgtttgaaattgagggagaggataaacaactaaattcctgtattatgttaagcacaaagttgcatttttatttacttttttgttggtggtgccaaagaatgtattgcttatatcatttttcatttgctcttcaaaacttagccataggcttgtgcctttgcttcagttttaagcatcttgtaaagcacgtgtggcctgagagtggcctgttgctgctacacctctccaaggtgtcttcatgatgactctccctgggagcagccagcacaagtgcagttgtcctcccgggagctgcaactggtttgccctgacatgcgagaattagaaagatggccttttggaggttattaacatgatggcattgccttagccatcccatagaaagattgcaagccagcaggactccaaattaaaattatgttcattggaaaccaacagtaggcttgtaacaaaagcagcaaaaccattagagatcactcaaaggctcttagggaagtgttttttttctcctgtatccaatatggaatttactatccactgagacaggacagagtttacagatttaggttggcctctgaaattaagactaaagatgaaaaccaggtgcttcaagaagatgaagatcctgtctgtatttggacatagcagcatgctattaatttaatttctaaataagtggaggaattttcttgactcggaaaggaaagctcctgctggccaaattctccttcacctgatggagctagagttgtgtatcattcacttcagcaataaatatacttgggggtgagatcaaggatgagacaagaaagaatgatcctgaaattgcctgaattttataatcccagtacatgcaggcacccataaaagatgatagtgagctgagaggaaagacagaggggaatactgaacaatagtgtggaggatatgacaatccatatcaaaagccagatacataaagcttgatgatataccaaaaaatgctaccctgttacatctgacccttcagccagttgtatatgcattctattaatcatttgaaaaaaagctgttctttctctgggagagagaaagggctcagggcaggaaaagcaatagaatttgtcttctttgattactcactgtgactaaagtctctgttatgaaatgtgtgtgctcaatgaccattcactaaatgttccatgattgtgatgaataagatccactgcaaacgagagccattgattcaccagagcccagatgccaattgaatctcatctagcatatctcagctgtgagctgcttgcgggcaaggactgtgcctaattcatctttgaatccccccagcacctaatgcaatgtcgtgcatcgagcaggtgctgcgtaaatgtttgataggggagattgctttcctgaatgaagggagatgtttggtaacataatccatgtagtaactacaggcagacatttagaaaggcttactcgggtgctgcccaatctgcaagagaggagcatacagccccagcctccctcactgatgctgctgagagaagccactcacaaatagaggagcaggtaacttctgaaaggctgggggactttggcacaaagctctgagacttcgtggcttgctgcagcatttaacaggaataacacttcttagaaaatgctatgctagaaggtgatctacgtgtacatccagataaagaaattacaaattcatttaagttagtataaaggccgtgatacaagagaatgataagtcaaaccatgtcgaggtgaggtagaccatgtgggacagacttcatcgatatttataccgtaattatgaagcccctaccatgagcagtatgtaaagatcaggaagacatggccttgacatttaaggaatctgcagtctgctgggagaggaccctcaccacagctgagacacaggggagcagaaggattcagcgtgcaggcctgggtgtgatctaagctgtgtgtcataggggtgcgggggcttcgtcatgggacctgacttttctgactccctttctacaacctaaaatcgcattaattgtatctacttcatactggctgtatgtggagcctttaagcagtgcatgtgcatggtaaccactcagtaactctgagctgttatttttatgggaggataacagaacaaggtcaagaccaagggcattccctgagccacacttggctaaatattttacagttctctcttgagtatggattggaaatgaagaccattctctctgtacattgtgctataaatataatgatctatacatttatagacttagcaatgcacagttttgagggagatgtttaactttttaagtgctagttgcttagatagcattgtgctcattctcacctcttaatttaattcctcaggtattgtgggaagtacctgaaccaggtagttccattttaaaaactgtaaatggtattgagaagtttaggtgagcagaaatcatcacaggctgcactcagccgggtctatcctgcatggtgataccctatacttcaagtggagagtgggatccgagaaacaataggaatcccttcttcttcagggatattgacccatatctccataatgtttacaaaatctgtttaagacacctgagcaaccatgaacacagtgcctttctttcctatagactttgttctgtctgtggccacattccccacggtggattttctttctgaagatgaggtgtgagacaggaagaacacagctgtgctttcagatcccagacggaaatagtgggacatgctaaaccatcagaaaaaaaaatattttgacttatgcacagagcatattttctttagaagctatcagggagaaagagcaatttttctacatgaaattccatttcttccctgtaccctggcctccttttaaaaatcaacttttcattgaaacactagtggactggacacaggtcaatggtctgttctgctcagcgttggaacagatatgaagcagtgaataccatcgcgggctgcagaggagcccacagagccttcctgtccttttaattccacgatggtctggatagaaaagccaacctgctgttttgatgacttaatttctttttctcagtcactgcagcaatgatgcctctaaaagggacagcccccttttctgtggaaccaactgcattggaattctgctaaatggcactaaatgtcttcgaaatcaaaaggagaatataatttaagtgccactgggatcttcccacagtttctctgtacccacacgctagaacactgcctggtgacaggtctatagtttagggtaacacacagtggggaaaaaatgatggtttttcaaccatgtatttcaagaaattgacaattttaatagcacactcttaatggagaatcatccagactttcttccctgcttgaagttgaaaacatcagtaagatgtgagaaagcaaggtatttgtaaagaaattagcatctatcttcctcccagaaatggagatcccaatgtgaagacagaataatagcatgggaatgtcacccccaccaaaatatgagctgagtttagagatcccaaatgggaatgggaagaaaatcacacttttctctctgaactattgtttttacatgaaatagcacatactctctatatagtgtgtggccaagagtaccattgttttaccttaaggagaagcaagcaaatgaatgtagattagacaaaaattgcaaaacaaaaacatttctttaatgacaattgaatgagtacctcctatgtactaggcatacacacttgatgacaggcagcttcttctctctgggaactcacatctcagtgaacatttccaacatatgatcaatgcacacagcactatctggaaactgtgtgatggctcacacagaggtataaggcatagagagttggacggcaggccaatgcagaaaggtggaagggctgtgaatgcacatgaggaaggagtggggttttaatgaaacttcctatgtctctatctccataaaattaaaataggagtatacctctcaggtcaatagaaggaataacttcttgataatgaaagctgttaagatggactgagttacaaagcaggaccacaaaattggctttcccgcgatttgccacggttattttaggaacagcaaatggcctttcaaaatcttgtcaatatctagtttttgtggtctggggctaagtgtaattaggagtggattgagaaaagtgttttctatattctccatctctctcctttctcatgtcccattcccttatcaagtcactacaattgagctttcaactccatccattccaacacaactgcagttatcaaggtcatcaatgactcaatcttaccaaattgccaaaagtcatttcatcttcccactgtatttctctcttctcagtaacaacaacaagaaataaaccccaaaacatacttgcctctccacgcttctgtgacaccaaactgcatttacttgcttgttaattgttaggtcattgctacttctgggtcacctaagcctctccttctctttctgacctctaaaagaagggctaccccaggattctagcctaggtcttccagtctcctgtttgcacactctgtcctaggagggtctcaagaaatcccatggttttaaatgccatttgtaacccggttatttccaaacctatatccttaacccagttcactttcctgaacacaaaattcattcaaatgcacacttgaatccaacaggcttctcatacttcacacacacacacacacgtacacatgaatggaatttcatgccatgccataccccccacacaaacaactttcaaccttgagatgcttcagtcttagcaaacgacactaccatccagccagctgattgggcctaaagccagcaagcatcttgactttttctgtttttccctcttatcttatattcaatccaaagaccatctcaactcttcatttcctgctattttcattgctgcccccacaggttttgcaactgtttctcaattgggttattgcaatagccttctaacttactttcctatttatgctccttctcccctgtaatcaattcttcaactatcaccgaggggaatctcaacacttaaatcagaccatttcactctaatggctaaagccttcaggacttactatatacttagaataaacttcaggcttcttaccatgcctacaatgccttggctaatctggtttataccaatttaggtaccccgtttcctgaagctttcccattgtcaccaggtttccacctgactggccttatttctcaccccctgaagcaagcagtgcttgctgccatccttgccttttgtacctgacctcttcttggccgggaatgctctttcctggatcatgaagtagttgttttcttctcacactagccctcagtgagccttctctgaatgcctgtgctgaagtacctcaaacgcaccatcagcaactttttgtatcactcctctatttcacagaagaaatctacgtatgtattttgcattattatgtctttcacttcaatataaatggagaatcagtaaggatgtaaatagggaatctttctgaggataaggacttaactcttttattgctatatccttgtacttactacagcgtatggtgtagtagatgcttaaaaactattgaatgaataaatgaactaatgaacaaatgaatgaatgaggtttctttgaacacaaggggaatgagagctagactagtaaaaatcgctgttttcatttctatttctaaaaataatatttttcaagggctgagactacttaacactgaagcattagacttggaatcagcaggaataggttcaaatcaaacttcatgaccttgggacaattacaaactctttgtgcttctgtttcctcacctgctaaataagcctaagaattcttaccattaccatggagataatgatacattaaattaggtaattgcaaagtctctaacatacgacaggtgcccaataaatgtcgcagttataggctgtatgtctaaatatctatttccatattaaaattttttcaaaggttaaaggtttcattctcttccttagaatttgcctcagaatcacacctatccaaagcatccttcctttgccctgtaagcccctattttgttgttgttgttgttgttgtttgagatacagtctcaccctattgcccagcttggagtgcagtggtgtgatctcggctcactacagcctctgcctcccaggttcaaacaattctctggcctcagcctcccaagtagctgggactacatgcaccacacctggctaatttttgtatttttagtagagatggggtttcactgtgttggccaggctggtcttaaactcctgacctcaggtgatccaccctccttggcctcctaatgtgcttggattacaggcatgagccaccgtgaccagcctgtaagcccctgttttggccagtcatctttagggatgagggggagcatctggcttgactgcatattttaagtgcttggtctccatgttgatgggggccacagaaacagatgatgggaaaggaatcagtctgttcaaagcctctggtcccttctctctaaggaaatcagtaagctcactgtcatctgctctgccaccactgtctaactggtaagatcctcacttggcaggcaggagcctgctctctacttccagccactctgccaccatgccagattcttcctagattgactttatcccagagcatcatggggatgtaagcttttggacgatgtagataaaacaaaatcagaggctttatgcctgctgttccatcaactttccaggaaggagctcagctatatgaagtttacccttccagtgggcacagtgacttagatgacatcaaaaaaagaaaaaatatatatcccttttatcacatttctgtccatttattttaggctatggaagcagattgtctttctcttttcccacattttttttgcctctagggctgctattctatcaaagtaaggtgtgagcaaatcctctctatactaaagcctaaaacccatttttaagtctatctgtgctatgcttttctagtgttccagatttaagtctgcagaatcaaagggcgtttataaaaaacctaagtagctatttatgtcctattttgtgctgatgccattcaccaaccggttgatggtggtggtgatgatgctggtgctggtggtgatggtggtgataatggtgatagtggtggtggtagtggtggtgatagtgatggtggtgctggtggtggtgacgtgttggtagtggtggtggtggtgatgatggtggtggtagtgatggtgatgatgattaaaggaagaagaaaaatacgaatcaatgcatactgaatgcttactataaaatgttatctttacaacaaccctataaaggagatattatccccattatacagattcaatacagaggcagagagaaattctgtaacttgcttaactagcaggtggtaatatttcaatccaagtggtctaaagccagaattttgttaaccaacagattattttaactttggtccacttttataagtacctctactttcgcatttagtaactggaagtaataacagctgtcatctctcatttgcagtattttctgtgtactcaatattttgagtgttatgagagaaagatgcttagtaaatactgaaaagttatttgatttcaacatattcttttaaatccaggatcagttgttgcaaagtaacacagcatgcatatttacagaaggaaaggtattcagttcaagaaattggcttttcaaatgccttagcaataaaaatgacattacatgcctacagaatgtgaaattgtagaaagataagttctcctcaaataagttgtaaaaagtacataaacttttaggcatctgtaaagaaaactgaaaacaatcccaactgaggttagagaggacaaggatggaataaaaagaaaatgactagctactaggtgcacaaacgtcttactaatctcttgattccatttacctacaagaaaaaggtcataaggtttagtctgcctaacaaaggtaatatgtgtttaatacaaggttaagggctttcagttaactgactaagaggagagttctacaaatttgaagtcgatgccaatgacttttcaaattaaatgtaatagcagctgcccacatggaatagatttggaagcctcagtccattttctaattgactgaacaaaacgaggtctctgttgcagctcatcctcctagcacttcctgtttctcagttccaaggtaactgttaatggaattaaccaattttcacaacatgtcctgagtcataatacaagtctataaggcagaaagctgagagcactgggttgagaatcaaagatccaggattgttaatttaagtcatccatgaactaaatctgtgaccacaaatgagagttacagaaaaagagatttggaaaaaaacttctaggtcattcagagcaaaactagcacttaacagatacagggctgtgatcctggggaagtattcagcctaagaactcctactatgtcggtggcacagctgggccctgaaggtgggttctcttctcccaaccctcagcccagtgcccttcctactgcactgcatgatttcagtcatcgcttcagctctaggagtccaagaaataattccagtggttcaatctgccatcctaaaaccaagatggtagctgatataggggtcttaagtaggtacctctcagtcatttaaaatagatttcagtcaaatccagaataggtccctaaaggttatagaactatgcagttgcagcgagcaaggtctgcagttcacagggtctctgtctgtgcagagggaaccatgttcctaacagccgtgctaatcagctcctttttctggtagcattagaaggacagagggatttaaatagagtgggcattcagaataacctaggtgatttttccagcaagtagagaaaaatctctaaaggcttcaagacattggtgagaggacaggttgaattgtagaaccaggcaaaaaataagtaattaagaatgacagaaaatgatttccagtaagctggaatctctcttcccaatgctatcttaaaaatattttatagcatgattctttaggcagctatctctctctctctcaccaccactaaatttacattattaaaaaatataatcagagggctttaaagtgcccaggttggaacatagaactaacatccgattataggtgaaggatgttttctattttgtgattatgttccgcagtttatgctctgagctgctgagattctgaatctaacaaatagttttgttgcaacaagtttctattgcacatttaaatagaagaaatgagctggagttccttttcactattgcctctccacaatcggggttagacctgcctctctagttctctgaccgtgtgagaaagtaggagccagagggttgtcaggcgccttgtcaccatgtggacagaggatcccatcagctcttcctctccctctttgcttttcccttgtttaacttgagccaattaagccctgtactatcattaattgttgaactggcacttttagacttgagaaaacccatctagcaatcacctataaattagccttcagcccctctaaatagctttaattaaagtcatggctggcatggaacctgtccaggttttgtctgtggttacaaattcacggtgtcacaggtgtggcaggaacaggacatatattaattctggaacctcagagtctcatccaggtcaagttcagattttttaaaagcgcgtgtccatgcaaaccattcactggacaggcttagctgacagtttatctccaaggacttttctgcagaaggaatcaagacaaacttccttgtcatcttaggagctgactctttcaaaactagacaactagctaatcccactcaagaccaagggcaccctatgtccatacagagatgtactgagaaagtaggttatatacttgaattgtcattcaaccgtttgctctaggacacaggtagaaactcatggccacttctcgcagtgctcctagaaccagctcagactggagaccctaaaaaataactgttatgtattctacactaccccaggcatggtcgttgttaggaaacaaccatctcaggtggatcacttaagagagtatagcctaataagtaagaggcatggacatacactttgaccagggttcaaacctgattctccttcttagtagctgcccaactctgggaaagacacttaactttatgtagttaataacccatgtctccctagggttgtgctgagaattaacagaatatgtggaacgtacatggcactatgtttgacataaacatgtggatgataagctacagctctgtaaaaagggcatgtgttgggaaaacgtttatctgcagcagttcttggcaacagctcacatgtgggcttgaagacactgctgaatttgctaccaaatcttcagagtaccatcttatcactcctttttaatctagtcttctcaaatctcatctttttattctttgacaagaaaatcaagaatgtccagtgagggcccataattcttcaaaaaataataaaaatgtgtccacaccctaaattagctgctgtgatgattctgaggaagaattttcctcctccttttcaaaggataaagattctgctgtgaagcctacacttccctgtcttctctaggattgatcttctcatcaaatttagtgagtgtttagcaccttctttgtacttcctcctttcctgccaggctactagcacattcaaatcccttcaaaacaaccatcacaatcgtaactacatgagagccttgcctttatgttctctccactctccactgtccccagccaacctcccggggaagtcatctgcacccatgacttcccttcctcaggcctaccccactgcacaccatagacactccagtgcgagggcccctccagtcttcccccagcctttccaaaggcattctgatctcagctaacagcaatatcgtcttcatagttggcccatgtggaaacattctactttcccttcttcattctccaatgggtgaattgaatgagtgagcaatgaatgaactgatgaaaatgtttatcatttaatctatctctgtactccacaacatgctgttttccagatctctttattgcactgtcttgtcatcacttgtattgttggttttgtttcccctagtgaactataagttccagaagggcagggattctattttgtattcacagcacttatggtgggctctgactagatacttgataacataaatctaacatctcagcaaccaaagcatgccatgatcttcaccccaactattgccttgacatagggcttcatcatcatgcctgtgctattggacaagccaattatttcttcgtcgtcatttagatgattcatttattcaacaaatatctattgagcccccttttgtggtgggcctttttcaaggtactggaaaaaaatagagaaacttgctgttttcatgtggctagcagtgtagttgacagaggtacaaggatgcaaataaactctttgttctcatgtggctcacagtgtaattgagagaggtacaaattgggcagtgctagggctctgaggatgagacagtggggtaagcacacacaggctgacgggcagtgctatttccaaaagatgctcaggaaagccctgcctgactcgctggcatttgagcagagccctgaatggggggaaggcgtgttccttctagaaacctgctggaggtgttccccccacccccgaccagtggagggaataacaagaacaacggtgctgaagcaggtgtctgatgggtttacagagaccagcgtggctgggctgcagggtatgagtatgtgtgtaggtggggggaccaggggtgataggagatgagggatgatttgggggagggggcctactgattgtggcaaaaactttgttgtttattctgaattataggagaagccatcagaggaatttgaaaagagaacttaacttacggtccccagacacagctctgatcaccttcctcctatattaaagtgtttgattcgcttgctattccctataaaataaactccaaatgcttttgcttgacatataaattcctctgagatccaggcttttgggtttctcacccccacttcctcatcttcgtttattctccagccgtactcatcaatgtctatgtctgtggctgctgagctgatgcaaaatattccctctgtcaggggtacctttccattcttttttgtaattgttcacattcatgaggatgccatatcctaatgatgttgtcttggaagtgaaaaagccctgcagcatatcactgatgactatatatgactagtgctgacatcagtgagcgtttatttagcatctactatgtgtcaggtactccgcagagcaatttttattaaatacttgaaaaagttcttcgaggcagagtcaccaaagtccccacccttatttgaccgatgagaaaacagaggatcagatacattaaatcagttcccaatttaatacattaaataagtacactgctatttatcaaagcagcaaaatagataagctcttgtccctcagctgcccatggtgttctatacatttgtattgtgggtggtcgtttatgaatgtctccacatttaactgtaagctcattcatggaatggagcatatttaacttatcttgttatcctcggtatttagcgtattagttgctcaattattcgccaatataaatgaaaatctgagaatgataaccagcggaagatctaagaggatttatccattaaaaggcttttatttgctcatttttattcattcattcatttctgtatctgttccacaaagctatgtgaacccagtgtgtaaaggtgtgtacacctggcactattgaaatgtgaagataaacacaatgaacacggatcccaagatgcttaaaatcccactagaaacagagaaatgagaactaaagtttattgaacattgacaatgtgccaggcaccgtgctaggaacttaacatcaattttcttgtataattgcccatcaggatgggttatccacatcaggaaactgaatatccaggaagggaaatgtattttttgaaagcacataattagaagttagcagagcagagattctattttatctatggccaactccataacctcttttcttcctactacatcacaccagggcctaagaattctaattatccctacataattctgacattggaaccatgaagttctcacgcgagattccatgccattccttcacctgcaaaggatgcgaatgcaagggccgacgatgcccgcaggggaaggaaggaagccggtctcctctggactgaagccagggcaggctcagacagctttggagccaagagacggagaggctccgcttctgggagcacaggattttgacaggaattgtggaaaatacacaggtaggatgctttcaataaaggctgatagaaatgaaggaaggaagcggggacggaggggagaaaggggaggagggaagaagggaggagggaagaagggggagacgggcaacttatgttgcttaattctgattcataaaatctgtctaagctgtgtgtcttctttctcgttattcattgcgttgaccttccccacggccacgtggggaatatttaggaacacagatgttggagtcagacttgcccgggttcaaatatcagctccagctctcaggcagcttggctaagcaactaaacacctctccactcccgtttccttctcttggaagtggaggccacagtagtcacacgcggtagatactctaagggctgtggcgaagggcaaatggttctccgcagcatgtgtgacacgtgaagtgctcgaatgcctgagtcctggcagtcctacccgcccggctgcggggctgcccacggccttgcgcttcgtgctctggttgggtgactcccttccgcacggctgccctgggtccccagccccaagggacacttcctatgaccccccgcttgttgtaaaggccggggccttcggcctcccaccgcttgaccaccaagccggcgctgtccgtgagatctcccaggcatgcggtctcatctcagcctgaaagtgcggggaatttccagatgctgcctgagtgacggttattcagcagacgagccctctggggtgaagtcccgcgtggagggggtttccgggagcgcaatgctcgctggctgcctggaaccaagggtgatgcggccccccttccacacagagcaggaagaagaggaaggctggggccagcccaacgtcggggtcactgtgccaggcaccccctccaggtcctggcggtgtcgatcaggacaccaccaatgcgttcttgcagacaaaatgcacctatgctgtgggaggaagagcaagcggttcgcccgccgcgcatcagtgcacccgtgtcccggcgcgcagacaggtccggggcacctgcagctactccggggcacctgcagctattccggggcacctgcagctactccggggcacctgcagctattccggggcacctgcagctatcccggggcgcctgcagctactccggggcaccgccatttcccgcccccataagcgcctagagagccacgccgcgccccgctcacccctgcaggcccgcagccgctcccaagggctggcagtgtcgctcacaggtgcactttgttcatgctgtctgcctccacagttgccgaagtgagttctgcactaatgagctcagcatgcgggacagcagcgccggccctcactctccagggacgcatggagctctgtcaaatgacccgacaaacctttgcagcgcagaggcttctagagggacagagcaaccaccatgccgccgtccgaggagctggcaaaggcacgcggcacctgcaagccggagaaaatggtgtccttcctcctgtgctggactgagcagggaaggaggtcggggctgcgggcgttgtccctggagctgcaccctgagctcagcttctaattactgctaagtgcattttccttccaccagtcacaggtaccttcctgatacgtagagcccatcgaatagaaggtggtgtgacttgggattctaaaaaggagactcggggttagaaggggtgcgtggtgtcaagaatgaacaagaaacatgctggactcaggaagccggctggccgcagtgaaatggagactctggagcacaggccgcggggctgcaaggcgcaacctgaaggcttgctccgctctggaaaggccctgctcctcctggacggtgtctcttcccttcccgcctcccctcggaggctgcctcccctcggacaggaccaggagcccatccaccacccagggagcagtgcggctttgtgcttaggcctccggggaagtgagctgtttccttgatgtcctacaaagaggattattcacttggaaaaacagaagcttgtcaagctgccacaatcgccagggaagattccatctctctctgatggagataaatggaacgggagacgtggggctgaagagcgggggctggctgaagggaatgaggtgagaaacatcttgggtggagatgatattagtcacacatgttaaccctgccttaggctgggaatccagaattgagaaatgaactccaccaagatggaaggataagaggagatccgttccaaactcccactggccccgcggtgggaaatcaacactgtcccacgtcctaatcccactacctaccttctgccccgctagagttgtccacaatcaaagccatttctccttttaacatggacagagggtggtgatgtctgcaatagctctgtgccctaaagctgctcagaagggaatgcagagaaaccagcgtgctctcttgttttcacatgggactacattcccatagggcagcttagttacttaggtaagattcccaggacactgcgcgaggccagccaggcatgacaagaaagggcaataccctgccccatggaaggaccgttcaagggagggattgggctgtcgagtggctggtgtggatatctgcacgtcatgatttatccaggactgagggaggacagcaaaggccccgcggctactggaaaccccatcatgtcgctgagcactgggctccactttgctactcatggatggagacagcgcttcctacacgtgccgtaggagcttcctgggcagaacagaacatgatcgtggaaacgagtcttcgccaaggcagcgcagagggccgaggggtggggcgcactagatggcattgtggtgagttctctctctttcagtagttccagacgtgaccaagcctaccttgtttaggataaattctccttatgtgagaaaatgggatccccccagcaaaaggcacacggattatgggctggtctcctctctgcttctttaatactacttaaaagcagtgcctttggctattgctataatagagatttccattagagccattttctcctttcaagatgctgtcgggttggggaggtgcagaggcacagtctttcctatgcacgtgtgttctcgcacctgcatggaaagcaacacctcaagcaggtgagctgtgaaaggaggtatggcagggccaaagcgcagaaagaaaaggaatccccctcccactgtgcgtgaccacgacccccaaaggtcagtggggctctgggaagctgtatcccaagccgagcaaaagaggaggctctctctatttctttgcagggagtgaagaatttcaggtcacttgtctctgttggtttagcatggtacccaagaacctactcaggctgacctcaaaggtatactccaatctcacctccaccccgctttctgctggccacatcaagctcgcagtgacctagccctgacgctgcacagcacatctgttttcatgcacaggtgcctctgctaagagggcctcccactcctactcctcccgcttctcagactagtcagtggttatcatgcggtaagtcccagctccaacgtccccttttctaaaatgttgttatcgatttccctcagttattcagtggctacctctgtttgtaaacagcagtcctttgtaaagagcaagtacgactatcaaattttagttcagtcacttaagggtatattcctacacgcatgcacatgtgcatgtacaaaccacctatactaccagctattgcagaatggacctttactaaattctagctgatgaagtagatattaatattttcatttcccagataaaagagcccacatgaaacagtgctaatacacattaacagagcagtagtagaggtgggagccctggtctgatctctctgacttcaaatatttcctattgttctaattagactgggagcccttaaaagacagaaattaatagttcaggtcagtggaaagcaaacagactctggacttagatctggttgcaaatttcagttcttacagtgattgcgtgattatggagaaattacttagcctcagactgggcctcagtttttccatccgtaaaaaggtaaaacaaaccaaactactcagttcacaatattattttaagcatcaaatggaagtttgtatgtcatgtactgaaaaataaacagaatgtgagctccagcccttctttttatctttattctcccaattcttagaatactgcctggcacttagtgagaactctgaattttttcaaaatgaatatattttttaaaaagcggattggaccctctgacaggtgaacacaggtggcagagagcttgtggggggtgtgtggtgaggggcctgcttaaccttatttatagcaggtggaatttatcaaattgagactgatgctgtcactccaactctttagtcacaactttttcaaatatttgatttggaagattttcacatgatctgactttttccttttcatcaacatgactctccccactgctgcctctctctctatctctctctctttcacacacacacacacacacacacacacacacacacttatatacccattctgcccctgggaaccactgctgtgcaatgccgaccacctccagatgtgcagtcagcagagttacacaggcctgcacagtctcttggagaccacactgagtcacaccaggcagctgctagaagtgcttcagaaagaaagtcacaatttgttgtcttcatttggaatgctattacagaataccataggctcggtgacttaaacagcgaacttacatttctcacaattctggaggctggaagtccaagatcaaggcactggcagatgtggtgtctgacgaaggactgtttctggtttgcagatagtggttttctcattattatcctcgcatggctgagagaaaaaccatctttctcacatatctccttatataaggtgctaatcccatccatgagagccccactgtcatgatctaatcacctcccaaaggtcccacctccaaataccatcctgttgaaggtcaggagttcaacacgggaatagggagggacagacatgcagtccatacctcatgtatggtagggtaaatgaatagagatcgattcttcccccagaacatgaagtctggggacataaaggcattagtgttgagatattcaaggatgccatctgctgtctaaagtctgctttccagcttcctaccctcagtgtgaaggcatttgtgttcatgctagtcacctcttggtcataagatggctgctgacaaaaagagaaaagtgtaatcctagcagtaactgagtttttcatgggttatgaaaaagctctcttggaatccaacttccacttacaacccaatggcaaaaaaataggccacatggccatccacagctgcaaaggatgctggaaattagggaacatggttggtccttgggatggggcacctgctgccccaaacaatggctcctcttagcaaggaaggaaggaaagatattgcaggctactggcaatgtcttccacaccccacgttttctcttcctttcattttaccttttagttagagaaggctgttccctaaagcacacaggctaatggccagagaaatatgttaccacctccttcctcttttccttctcaacaaatgtttcaccgtacaaattactggcaggaggcagggaaaagtgtaaatcaggtcacgaatacaaatcctgctgtgagagtctgatgatcccgtgagccccgcctgccaggtttattgaaggcatgggaggtgagtgggtcaccgacgtgaggctgcatgacttagtgccttcagctgcgagtgtcagcaattcttttcaggggatcaggaaaaagaagggaagtatggcccgaactaaagctgaactcttcaccccttccctatggggaagaacagagctcaatgtgtctgggaacatgataaaaagtgtcaaaacaaaggctggaattatactgagctggggcttgaaattgggaaggaagacagcagttttcttcctcttcccttgatctccaaaaccatcccttcatgatggggagaagaaggcggaagccaaaggggtggaaggatgcagaaatgtcacactgaggaattaatctcaaaaaaaaagaatacccaggtctctacttcttagcattagcagcaacacattttgctctcttgtttgtaatatttggcttccacagcaacttagtattgagattacttagtcctcagagcattcacatgtaagagctacctatttaagagatgagtgtaaaactatgattctgtccaagataccacccagccacactttgatgcctaacactcaggaggcaccaatagaaggcacagaggagcagggaggtggacacccagcgggacaacccgagcgttcccccttcactcacccctcatgtcttctccccatccaatcatcgaatgcactttctttttttttggagatggagtctcactttgtcaccaggctggagtgcagtggtgcggtgtctcggttcaatgcaacctctgactccctggttcaagtgattctcctgcctaagcttcccaagtagctaggattacaggcatgtaccacgacacccagctaacttttttatttctaatacagagagggtttcaccatgttggctaggatggtctccatctcctgacctcatgatccacctgcctcagcctcccaaagtgctgggattacaggcgtgagccaccacacccagccggaatgcaggagtcaggctcttcaggtcgctaaagacatggctgcatgttactcttccccctgctccaaccgccatctcctacaaccatcctcagctcatcaagggagactgagggcagaaatggttcttcaatgactccactgtgtaaatggaatggaaaaatggtcccagcatcggatctgcatgtacttttggctctttgaagatggcaccactttcaacagctagtgtaaagacagacaattaaaatttgacatgtttactcattcagtttacctttgccaaaagccacagaggcataatcagggcctttcgagtaaagcagtgctttggagaagggtggcacagttaagagtggttccaatttagcatctaataatagctcaatttagtcacaaatcccatctgtttctacttgaggagttttacagaagtcaaagactagttattttcttttccttttcttttagcttgtacgttctggcccttcttccaccacactcacaaacatccacagataacttgcttcagggggagcaacctctgatcccatttagcaccccattagccacttctccagtagcagcccagcatctgaacacaaagcagaatgttgggtgcaatgtgggcctgtttcctgactcagcatgagtcttggcagtgtctgcaaactggtctccctggccagctacaaagatgggaaattacattccttgtttcttatctcctcccaaaggctaggtaaaaattgatgcaaagaacttaggcagtccttggaggaatatgccctgccagggctggttattataatttctgtggtgttgctgcaggtagggaagcaatgtgaaaaatcctcacactttcactccctttggttctcgttagtccaatgtgaaagcgaaagggagggggagagggaaaggtagaaggaggaagaggggaggaatatagagaaggaaaaggtgaggtgggggggggaaggagaagaacagggaggagaagggagagggagaggagggaaggcagatgaagagaaagaggtgagggagagggagagggagtatttgtttgttagataagggtgttgggggaccacagcagaggagaagatgagggtgaggcattaagaccaaccattaaggtcacagtgtacctagcattataatggtgtgaaaggatctgttgccagactactttggtccaaggtaagtgtgtccttatcctcccaagcctatgagagaataaaaaaagaacaggtccttggagagtttaccaaccatcttaaacagtttgaggcagactatgaagggaaaacacatttacactactatgagagcaccacagatcttcttgctggactttttatcttttttatctacatgttcccataaatatcctatttctatcaaagctagttattttattcccctcacttttaaaaatctagaacaagctgatattcattaaggaaactcattctgaaaataagaaggcattagtgaggcctccacttaggataggagccatctttctgggatgaggcacttcctacccagcatggtattcagccgggtgcagtaaaggtctatatccaaacactcaggattttgccctggatatttgattcctcacttgacttctctgtgtctgataaacatagctatacaattaaatgaatttaaaaccgttataagaagatattttaaattttcaaaagaataatactaaaaatccaaggcattcttcatgataggcagaatgccaggaaatcccatctagaaacattcaaaccaaccagatttggtgcaaccaagtgtcgagtaattggaaaagctaagtgaactccaagggcattagtctgccctcttatttccaagaaaagagaaaaacatgggccctggcttagcttgtaacaaatgtaataatttgttaagcaataacttaaatgaattatcatgttatgcatagaaatttcttgtccttggaaaaaatacttaggattaaatacaaatgagaaaagtattactaaacacttaatattaagccaatcattaaattcttagtaggcagtactgcaatgaatatcatcctcaaacttgacaatgtagaaaagctccccaaaagaaatttccaaaagcaagaaaggccaagttattagctttattgagacatgctgtagagaaggaaagcttttaaacagggtaagagtggtagcagtaaataatctaatcaaaacgcagagccagttggcatatctctactttctaactacacacattgtatttcatcatgacataagatattgtcacaaagtacaggagtcatgagctgtgtggaacaataccatacatcattccacaactccatgctgcactttccaaatgggcttgaaaagaattcccaactctgtaccattcaccatacacacacacatacacacacactcacacacatacccacacacaccattatcaatttcttaagctttctagtatagtaaataaaacaacaatacaaggtaaagaatgtgcattcacactgacatggttgtatggtataggttggctgttccttactggaaatgcttgggaccagaaatggttttaattttggattttgggggattttggaatatttgcatatacctaatgttataacttgggggatggaattgaagtctgaatacaaaattcatttatgttccatatataccttttacgcatagcctgaagataaatttatacaatattataaatgattttgcacatgaaacaaagttttgactgcattttgactgagactcattacatcaggtcaggtattaaatttttgacttgtggcatcatgtcaatgctcaataagcttggatttttggattaggaatgctcagactatgttaggtaaggagcattaaagttattgagaagaccatagttaagcactgccttcagtattcactagcactatgatctcaggcatactgcagttgtggaataaattaaagaacattggctttaaagcccaagtctggagcttaaattgtttatcaagcagccacccaaaaactcttagatctgataaataaattcagtaaagttgcagtctgtaaaatcaatatacaaaaatcagcagcatttctatacatcaataatgaatgagcctagatagaaaaaaggaaggaaatcccgtttacaatagctcaaacagaaaaaaaaaaaaaggaaaaaaacctaggaataaatttaaccaagaaggtgaaagatttctaccaggaaaactgcaaaacattgctgaaaaaaaaattgaaaaggacacaaataaatggaaagacatttcatcctcatggatcagaagaattaatgtcattaaaatggccatggaaaaaatcaactcaagatggtataaataacataagtattaagaccccaaactgtaaaactactagaagaaaatatatagagcacacttcagaacattggcctaggtaaagattttgagactaaaacctcaaatcacagacaataaaaatgaaaatacaccaatgggactatattaaactaaaaagttcttcacagcaaagcaaataaccaaaagaatcaagagacaaccttttgaatggaagagaatatttgcaaactattcatttggcaagggactaatattcagaatatacaagaaactcaaatgattcagcggcaaaacaaacaaaatcctgttaaaaagtggacaaaggacatgaatagatatttctcaaaagaagacatacgaatgaccaacaggtatgtgaaaaaatgctcaacatcatttatcatgagatacaaatcacaaccacaataagatattaccattagaatggttgttgctgaaaaagacaaaaaataacaggtgctggtgaagatgcagagtaaaggaggcttttgtacactgtggtgggaatgcaaattagtacaacttctatgaaaaatagtgtggagatttcttgaaaaattaaaaaatataactacctgaaatgcagctgacctactactgggtatttatccaaaggaaaagaaatctgtatatcaaaggaatacctgcacttgcatgtttattgcagcactatttacaatagcaaagataagtaacatggtttagctctgtgtccccactcaaatctcatcttgaattgtaatccaaattgtaatccccacgtgttgagggagggaactgatgggaggtggttggatcatgggggcagtttccctcatgctgttcttgtgagagtgagtcagttctcaccagatctgatggtttcataagtggtagtttaccctgctctcctctatcctctctcctgccgccttgtgaagaagctgcctgcttcccctttgtcttctgcaatgattgtaagtttcctgaggcctccacagccatgtggaactgggagtcaattaacctcttttgtttatagattacccagtatcaggtattctttatggcagtgtgaaatagactaatacaataatactaatacaatgctaattacagaagtaattctatacgtactggaatactatttggccattaaaaagaatgaaatcatgtcatttgcagcaatgtggatggaactgaagatcggcatatgaagtgaaagaagacaggcacagaaagacaaatattgcatgttgttacttacacgtgggagctaaaaatgttgatctcatggagacagagagtggaatgatagataccagaggctgagaagggtgtggggggagggatgaagagaggttgattgatgggtacaaagatacatttagatggaaggaacaagttctaatattaatatttgacagcacagtagagtgactatggttagcaacaatgcattgtatatttcaaagtagctagaaaagaggacttgaaatgttcccaaaacatagaaatgattaatactcaaagcgatggtcaccctacataccctgacttgatcattacatatttatgcacataacaaaaactcacatatacccaataaatttgtaaaatatgatgtatcaatgaaaaagtcaccatgtgtgttctttgttcaagttacttagtctaatttagctcaattttttcatctgaaaaattggtagggagaaataaaattatatctgttccctgttttctgaggttgttgtgaggttgtagtgaggattaaatgagaaatgcatatgaaagctcttggaaaatctttgagttataccaatatttgttgttaatttatttaacttcaatgaagcttactcttctcatttatcaaatggggattaaaataaatcgttctcctgtctccttacaggattttcacaggactaagcaagctaatgtatgtggatgtgtttgagaaacaataaagcacttcacaggtaattatcattatattaggttaaccttgagattcccaatatcatcctaccaagactcactgagttccctaaaagctaaatgcccttcatttctcattttggtggccttgtagcaaggagcccttctgacatattagcaatccagcaaatattgccattctcaggtatctcttgcttcctcttccaatttaaataattgtttgcatagatctgcataagttatacattagttgttactttacataggcatttgagttgaaaataatcaagctattattaacactcattcctggttgttgtttttctttctgtataccaaaatacaaaatactcttttctttgagggaaaagtacatagttcataataagaagtttcaaaaaaagaaaagacaaagaaaaaaattaatacagtgcaatatagtcatgcttcatttcccattccacaagctcttacgttataaaaactgcctctgctaccattagttgaaccctcaatccaaacactcatttcaatttcaaaaattagaatatccttaatcttggcaggggagggggagattacaaaaaaactttaacaaaagttcctgttccttatgaaaataaagtaagtggccagccgcaggggctcacacctgtaatagcaacactttgggaggctgaggcgggcaggccatttgagaccaggagtttgagaccagcctgggcaatgcggtgaaaccctgtctctactaaaaaagttaattacttaattaaaatatatatatatatatatatatatacacacacacacacaaaaatacaaaatttagccaggcgttgtggtacactcctgtagtctcaactactggggatgctgaggtgggaggatcacctgagcctgggaggtggaggttgcagtgagctgtgatcacgccactgtactccagcctcagtggcaaagacaggccctgtctcagaaacataaaaaaaaagaaaagaaaaagaaaaaaacaaagaaaataaattaagtgacatctgaaagtacacccaaacatcttaccaaaaaaataagtaagtaaaactaaataaacactattaaatgttcggtgaatgtgtatgtaacattctataagctgccttttctcttatgttatggtcatctttccatgtcatatataaactcactgtcattgtttttaaaaagcttcatagttttccatcatatgcatgtatcataatatgtttaaccacttatttaaattattgctaattttttagtgatataaaaatgatgtgcagattacttaaaaatttaaatgtgtgtgtattgtatgatctaatcattctactgctaggtatttacccaaaagaaatgaaaaaaatgtctattaaaaacttgtacacagatgttcatagcaactttatctgtaatagccgaaacctgtaaacaacccaataatacatcaataggtgagtggacagataaatggaggtaacgttcatatagtggaatagaaaggaatgaacacaataacattaatgaatcttgaaataattatgttcaatgaaaaaaagccagacaagaatgcctaggctatgagtccatgtacataaaagtctagaaaatgcactctagtgtctggaaatagaatgtagattagcggctgcctgggtgtgaaggaatggagagggcagaaggcaggaatccccaagaggcatgaggaaacgtttgggaataatggatatcttcactatattggttgtgatgatcatatataacttatccaattgtacagtttaaatacgtgtagtctatcgtgtgtccattatatctcatataaagcttgtttagaaatgggaggaaaatgctgtggggagcattcttgtcaactggtgaaattttctccttagaatgattttgcctttggcactgactattgtaatagcttctcatattaggttagccttcagattcctaatatcgtcctaccctgctactaatttgaccttctttctgactattccttcagttgaatgcatctttcctaaggcacagttccaatcaaaagtttttatttgctcattacctactgcatttttattcatctaattccccatatgaactccttatcttggcctccaagacaattagtatttggcctcagttcccctccctgagctctttctcccactgcccacttccatgcagccaaggtaccatatgcacattgggtcggcggcagctgagagtgtcgctgaggcgtcactttatgtgtaagactcaatttcttcatctggaaggtggtatactaattataatctgactaaggagttagtatgaaagtgaatgatttttcaggaagaaatttaagctgttggtagacatcatatttgtctgggtatctcctgctctctcactcctgcaaagcacgtgctctctccttctccatctttacatattccagttctgctccccaccgcatgatccagctcaaaattctattttccatagagtcttcctctgaattctcatgacgtgctagatgtactaccgtctcacaacacacaacacttagcgagcacgcatgtcgcgtatgtaagtttgtatgattgttacatacataagtatataccactccaccacctccacgctggtctgtaaactgccaaaggacaggatggattcatctttgctttctccaccatgccttgcagaccacgtgccacaaatgcttgttcacaggtaaaggggaagaattccaagtatcctatcctctggcatgagacattatttcttacacctcatttctcagcttccaagaagaaaataattctggggctacttctagtaatgacttgagaactaagctaagaaaatgttagatccaaaagatagtgtccagggtctgggatcatgccctgatgtgatctcgttgtatagcctggctaggggcactgaacctgggatctcctgagtgcctactatactctgccttctccttgtacttacacttatctgtccttatttgagctgctgctatggccttagcttcaattaaacttatttttcaaaaaatgtatagtctctattaactagttctctgtctattcaagctgtcagctgtcttaagacagaccggtgtctgtgcgttcccacaatgactagcagggtgggcacacagaagtcattgaatgaatatgtattaaattgcactggatttcaatgaatttgaaaagtgccttaggaatctcaagacaaaagtgtcagctcctcattgtatcttaattcaaagtttgaagatgatattttggttcaaggaacagagccagggagcagaaactatactgccagatgcattcactgaaactttgccaggtaggaagagtttgttgaggaaagcaagaaggggaaagagaataatctggatttaagcttggctattaaagaagatcaggagagaaagagattgtactggagggcagataatgagtcagattcagtaagagatcataaagtttacacaagagtaaaaaattgcaatacttttttttaatgtgccttttgtaataaacaatacctaaatatttgggcaattaaaatgttataaatgtaataactagaaggaggcagtaaaaaagttattctatgaatataatcatgaatttacacaaacatgatagcaacaaattctaagcaaatacccaatgacacaggattagttagataactatgatacagacataagctgcaatattgtgatgacattaaacatcactatggatgatttgtggaaggaaagatgcccatatacattaaaagtcccctcaaaattacaaaaatataataaagttgtggtaaatgatataaatgtacatactatgtagacatgtgtattatacatatacattgtttataaatacatttatgtggtttatgagaataggaaagtgactaggctttttaaatatatgaacagtgatgattgcctgcaagcaagattatatatgagctatttttagtctgtttatttgtactttctaaattttctccattaaatatgaactcttggataaacagagtaatttgggaatagttggacagttagtaagtctagtggcccaaataagcatgcaatgaaactagcttatgcaaaatagcaataataataacaatctgttcatattgaaaactttggaaattttgcattgaaggagaatataggacatgtcggtgtaacccagtacaggattccctctacaaccatcttcatgcatgttttgcaggcaaatgggaaatgaagaaaggtcaaaagaaggaagggagggagggagtaaagggaagaaaaagaaaagagatgaacggcgacaagcgggcagggggaaagagcgggactatgtagtgtagtgtttcgacgtccagcagtaagcattagccttgagggctcgtggtttaggagtgaaagtttgggccatcacagcagggagagaatcctaacaggttgacgtgctgcctgagggcacagggggtgagatttgggtagagaacaaaagaatgaacatagctgaagtcaaagttgctattgcggcagccattcgctctgcgtgggagggtgtgtgtggattctgagcagtccaagggttcacctgggctgatggttgtctctcagctcaagatgtttccagccatgctttgccctgctgttctgaggctggaatgctaagaactacattttccaaacattttgccagtctgctgtcggttgagttttgccgattgaagataccaggatggcaggcaaaggcaagatgtgggaaggatgcttccttctctttccctcttcctgtctgtgtggacccagaggtggcacaggccccagcagctgtgggtggccccaacctccaccttccctttgaactcccagaccaagtctcgttatgctctctctgacgtgccagtattcagaaaaaaaaaaaaaaagagcaccaagtccacagggtctcccattagagcagacatgtgctaataagagctctacctcttcctttgtttgggtctccatgaacggtggctactccccacagtcacctcaggaacacatggttcatttatttcattctcctcactaaattatctctgtttgaaacacctagtgcgggtcctgtttccccactgagcccagatgaatagagagggagagagggaaaatggccctggagcatgggcctgtgctgtgtcagggacctgcaagcacattacttcattggaatgacaggcagttcctgcaggaccttcagggtgagttagtttttctgctggacagcactagctgttacaaagtttaatacgccatattgagctgaaatcggtcttcctgtaattcctaggttttactctttattctgacactggaagccatatagcttatccaatttttctttttatgcgtcaggcgtttagaagaagctatgtctccccaaagccttttcttttccaaattaagtatctccagtccttccagccatttttcttcaaatatgacttttatcttttccttccctctcctagggcgtcttcattcaatgaaatctttgtgtcgatataactctcaaattttgcctaaatgagaacaaatactccacattttgtatggcctttgaggaagcagtgaaattaccaccctctttactcaaacattacgtttgtattaaatttgatcatttgactttgtgtaatatatatttttatttgtttagtgatggtgggcagcacaaattctacttttctctcatagcatactgtgaatatccctgttatttcctcccctccacatgcaatgaagtcagatctttctcatcccataccccggcaaattttaaagtaatttaaaatatttatttttacttctactgactttcatcttgtaattgtttcaatcaattattctaagcagctgacgtatttttaatcctttctcttcccagatttttgctgcatgcgaatttctttcttttctttctttcttttcttttctttctttctttctttttttccttccttccttctttctttctttttttgtctttttttgttttgttttctggagataaagtctcactctgtcacctaggctggactgcagtgatgcaatcagaggtcattgcagccttgaactcctgggctccagagatcctcctggagcctcagcctcctgaatatgagcagctaggacaacgagtgcacaccatcatgcccatctaaatttttattttatttttattttatttttgtagagacggggttctcactatgttgcccaggctggtcccaaactcctggcctcaagcagttctcccacctgagcctcacagattgctgggattagaggcatgagctaccacattggccactatatgcaaatttgataatcctgccttgtatttcaccatttaagtctttgaaaagggtagaaccaaaagcagagaccaatatcataacctatcaataataatttttcaaactagccattcacaaccgtctgttacatgtccattgaaggaacccatgtgccttctaactagtccacacactaatgatttgttctaaaatgtcctcacttctccctgtgttatccctttcttacctatggatgctctggtcttctacacccctgtgcgtctgatcatttatttctgcctctgcattcatcctctcagctgagctctttagagagctccctctgcggccacacccatttcttcagcacttcatttatttgtgtgctcatcaggaaattttgtgattctatattcagagtgtcccaaacttttgtagctattgtcatcactaacttttttgtttgcttttaaacgtgtgtttcttgaagtctagagtatgtgtcttagtatgtggtacctccttcttcgccttgtggggtatttttccagcttctggcctctttcactttaatttctggcatttcttgaaaaggctctgtgccgtttctctaaagttaggctaagttcagtattttgcaagctatgttccatgaaatgtgaaatggtattgcataaaagccatgttctatggtcaaatgattttgctagatcctgcgtataatggctattgttggaagatccacagtgtacaataacattaaaggctccaaatattcctgtagtaaaaaagccagcttaactttgtttaacccaacacctccccagcttaactgaccatagaactctttctggaatatgtatttgtagtttgagatcagcctccacttaaaaccttcagctcacaggtagaattcagtttggtagcatgaattttaaggacaattttgtctatgcatctgcgtttcctcaacatttacaaatcatgccccaggtaccaggaactctgctaagttctgaaatacaaagatgagtacaacatggttcttgccctgatgttgcttacgatctgctggcagaggatgaaaatataaatgactggccagaatacaagcaggggttcaagcaaaatgaaatggtatcatcagagaggatgcggtgaattcagataaagggtatctggaagggtttaaagaggtgaaattttatttagacccaaaagaataaagacaatttcaaaaggcctcagagcaggacaaataaaaggcaatcacagaattttagttttgaaaggagtactggggaaaataatttcttcaataattcacatttaaaaaaattttcctaactgatcttcactaagcatgctcttttgtctatttctccattaagtacggtactttgaatgcaatatatttccaagtaatatacctaacgaggaatacttgaaaactcttcccatggattgtagattatgtcaatatggcctaaaattctgtttacgtttttggtaactacatattgcattatcttaaatgatgccatcagtacaattttttaattgatatcttagctaaaccatacctcttctatcccatatctctttaaatattttttaatcaaaaataatacctcacatttattctagagaaatgtaacattattacatccagttcccagcctgccagtttcgttttttattgtgatttcatcattcatatatttagtgtctcccctggttcttgctattcctgatcttgtaggtgtgctttctatattgttaagtaaatgtttgaatcatctataaaatcatttccaggacaggagtgatgacagaaacctgaggccctgctaattcacaccaagacaacaccaagaataaggacagggaggtacggacctaagctgtctcttccagataaaacaattagccttgtgcatggagggaaggcaaggacagggcgaagcgcaggaaatagggttaaatgtgtgctacacccagagtgtggaggtaaggaatgtgttctgaggcagcctggcagcagggaagcctgacaggctccgcatgaagagctgtcttgcctaggagtggcttagaaattggacagctcaggtgacatgggccccttagttggataaggaggtaggcactggaagactttgcagtgatgcaaaagagagggtaggagcctcacctcagtaagtggcagaggaaactggcagggacactgagaagagggaaacagcagggaaaaatgccctcagcagtgcaagaaatgagatgggacaaaccaagattgaaaagtatgtttctgtagcacgggatcaaataaatgtgtgtcagtaacaaatacaacgtagaaagaaaaattcagcttggagcagagtgtgtttgggatatgatagaacttatacagggcagtgtgagttggtcatgcccatggtggagacctggagctcagagaaaggctatgcctggatgtgtagcttgagggacagttctgataactgacatcacggaaagacacacactcacacccctggagaaagtgtggagtgtgatgaaaagaggatgggagaaagaacttcaggggattgggggtctgatgtagagacagaaggagtgaccagagggagacctcagtgagcgtaacgagtcagaaatgggcaatgtcctacctgccaaaggatctatgattccagggtggctgagtcaggatttgttcttccaagttcattttaatgtttggacatgaacactttatgtggacacattcatagcagggcacttttaccatttgttagcgtaagttctagggtctttaaaaaagacactgtagtctgggaagtatcactccctcaaccctcagctgctcctgtccctctgaggccagcctggcatgggagcccaccttccagctggttgcagctcctcctgggagggaggccggagcatctcagcccagttctctgcagaaagaaccaaggcaagtgccaggctcttgcaggctgtctcatcaatatgccttttctccatttgcctccagctgccaacttgtttggggaggcggagggatggaaggtggtgttattgcttttgacttgacttactgttttggtcttttacacataatctgccccctgacccaacattagcataatgctcattaatcaagctctggcctccaattaatggccagctgtgtggatgccgtgcatttaatagcttctgaatcagtcaggcaaaaggttaggcaaatgattttggcaggaggggtggggaattctgaaagagactggaggcatgtatccatgcagtaagcatgtttgacctcattcgtgagcgattggagaaggaggccaggaggggcattggccaatcatcttcctctcgttccccatccctgagtccccaccctaccccagatggcctgaagacaacactctcttccatcctcctggcctggggtcacacacccccacatcactgcccaggcagccggccaaagaagaaagccccgatttattgctcttggcagcgtctaggctgggcatttctataaacccagtgccgggctgactaataaaacacacacccagattcacccctcaataaatgtctttcaacctttaatcctgtttgttgcagtctttaagggaacattgattcagcaggcaacgagggcttttcctcccatctatctcccaccgatcgatgttctgtcaccccactccacccagcccgacaaaggagaggcctctgaggggagaggagggcatctctccagatttatttcactgcttatgaaaggagtttttaaaactgccacatgtgttagctcctagatagcttttctgatcctcagctactctaggtgacctccttgaatttggagcacagggcccaggtcacagagtaatggcacagacatgtggaggaggagttcttaatacaactcagccaaaaaggagctacatttcctctcttggccacctttttttccccaaggtctcccaccttagttaataacaccaacatcctcctggtcaccctggcgacacacctgagctatctctacccctccctccctttcctgcctatccaaacaggtctcacgcctcatcaatgctgcctcttggatccatacctcctctccaggccattgtcctgcccacagctcagactccagagacccccatccagagccctgtgagagctcattcctcgatccccattattccagttccttcctatcaatcccttgctggaactgccgtatggtgctctttctacgacaggaatctgatcacatcgttgtcctgattatgaaaggttgggtaacttgcccaaggccatacagctggtgagtgtctgagtgaagacgggaatcgggtcatccgatctgtaatctgctgctctcccacatgagacacgaactcccctcttactgtaaggaatttgattttacttgtttttgggactgccacatacttctctgtatcatacacagtgcccatcctattattgaaattcagtaaatatttgctcacagaacatatccataaacaacatcctgaggtcatgtcaagcatgaataacgtgcgtcttcagagaaatctctggggcatttctttgggagcaagcatcagacaaataaacatcatttgaggtttttaataggagatcagtaaaccttaataagattggaatcagctatttagtgttaagctataaataaacagaaggggaccgtctgttcctgagactgtgtaatgtttctagtctcatagttcataggccagtgaacagacaggatgtctacacctgcagtgcatgcccagggccaatatgcttcatgctacagtgcagggagataagagaagggtgcaggcttgtcaccaaggtacacggactcctctccctacgcacagagggacatcccggcagtgccccaggagagtgtcacttccatcctgctgatctgtttgagaagtcaccattgcacccacctggccaatcctcagtctcttcagtggtaaaaacagatacatacgcctgtgttgtctgcctctggaaatgccagcccactccagctatatgactgaattagcaacaatgtatccaatttctggggacacctttgacctaattttcccaacggccacccagattaatgcagctgccaaagccaaaggccactgtgcaaaaaaaaaaaaaaaaaagaaaagaaaagaaaagaaaaagaaaaaaagaaacccaggactgatttatcacctcccaccctccactctggcctggtgtcaacctctcccttccaagctacaggtcagaggaaaagcaagaactgtcaagacttagcttagactgtggcctaaggttgatagtattaacatctcattcaaccgttgacaagaaagaccctaataaaaataaagggccaacccaaccagatgagaaagtcagctccatggtgctgatttactccttctctctggctctgaaaatcaaattgagatgcaagttaattcatttttattatcatctcagtctatcaatcctagctcttgtcgcttgtccccaaagaaaatcccagtgccttctgtgcctcattctaaatgcctctccaaagcatcctgccactgacaggctgagagcctggctggagaccagcctcaatagagacatgtctttcaggaggggacttctcagtccacccgctcttgccatagccctcgccaaagcccctcagaagtggacatgtgacctcctggatctgtcccagaatgcctaggctggatgataggcagatggctggacatgagtggtagctgcaggaaggccagaggttcaggctttgatcagaagacagtgagacaaagcaaagcactgcgttggaggggaggccaacacagaggccggccagatcccagggtggccccgaggtctccgcctctgggtgccacacccttgtggaacccctccttgtggctgtgggcaggacctagtgacctgtaatggatagaataatgcagaagggagggtggggggctcagaggcttgtcctaagaggcagtgatgccacactctatccgttgcagcactggctctggggaagctgctgcgctgtggaggggccgtgtgctgagggctggagctgtggctgatggcctgggagcaggtttggatcctcagatggctgcaatccctgctggcactgtgactgctgggtctcctgagagactctgacccgaaaacactcagcgaagaccctctcagattcccgacccacagaaactgtgagatagtaagtgtttgctgtttgagttcactgagtttgggataatttgttctacagcaaggaataactaatgtatgtggctctgcgttttgcctgtatagaaggcaaaggcttggtcgtccggcagacaagagctcaagccgagaaaaacactccagggccccattttccagcctggtgctgcaaccacaaaattaggggtggggaggacgggaacacttaggttgccacgctgttccagtctccagcctagctgttttcaaagctcaggtgcctctaatactcaagacaatgccatctgactgatgaggaagctgaaacttcgatgattaggccctggtaatgaatgtctgcggtggtccccatggtcctggtttccctttgtcttatcccagatgctcaaaatgccagattctaacttggcaagaagactcatcctctttcttgtaacatattataatctctgtcttctataaaatactcaggcttctagagaggatggagaagaagctggagtaacagcaagttggctccagaaattggtttacaaagcagaaatccagatgttttctctttttttctctctaaacatcaaatcaagcagcagcttgcaacactctgtgtggcccagctgaagaaattctaaacattgcttcaaggatctaactcacaactcatcttaaaccatcacaagaaaactcccattagagcgggagaggggaagtgtgtgttaatgagctgaagtgtgagaatgggatgaataagcagaagcttgaatgcagcacggaggcgaatgaaataattacccagcttaccattgttacaacgcaataaatttaatgtaattcctaaaggccaacccagttttttctttctttttatttttaactcctttttacattttcagaattatactttaattagcataacatttaaattagtgaatggaatcttaattagcagaagaaatagacttttgttggagtggtaactaaaacaaataaatccacttcctctttcaagagccgtttgcttatggcgcatttaatagcctagtgtaccataaacaatttgagggaaagataagtaattaaattagaagacatactggccagctcccagctcccaacaacggcacttcctttttctgtctcacaagcgctcccctcctactctcttatcttagtgggtctctgcagtctgagaacaaagacatgggtccctctggacctcttgggtgtttcccataattacactctcttgataattggcaggttcaaaaagcattactttaagtctccctgtttgttttccctctgcgatgtcctcttttaattcactaggtcaggaaaagcgctaagcaaatcacatctaaataatgacctgttagtacgcaccccacctttcctttttgtctttcctggtcccttcacagaagggccatgcttcactccacactggggccactgggagcgaaaactggcagtccagccccacacggcagcagggacagagcacggtgacacttaggggtgtccgtgagggcagacagaatgctcagggtatctgtgagggctgagtgaatgcttggaggctgcagagggtcctgcccaccctccatctcaaatgagaaaacaggcactaaggacgatgacagcacattgtataggtcagtcagggagacagctgcccccaactccggtattttggccctcagcctgggctctctgtatcatagcctgtacaaatgttcctcaaacacatggccaggaacttggagactattcctaacaaaggactatttttgacttaaatatgaggcaggatccaggctcagggcttaatgtggccctgcttgggggatgcctatctcacattttgtactctcctctgcccaagaaccaccaattaaccggtaagtggtccagccacaaggaagaggcaagacatcacttgacatgacaggaccagtatttatttggccacttcacaaaaggtccttaaggaaaaggaggaagcagccaccggcggggtgttacatggcctgcattctggtcctgacttcttgagtacttctgtgcacacaaagatctccctggacctgactgctttcacctaagattagacagcctttcagtgccccaacaggcaaagctgcatcccttgctaccagagttcttctatgagaagttacctgacaaactcaccggttgtgtaaacttgagaagttaattcactcctctaaaccatctgcttaatttattaattccttcactcagtgtttgtatttttcaataaatatgtattcagtgatcgctgtattccaagcatttctttagataaaaatgcaggatgaataaaacaggcaaaatctctgtccacatggcttgcgattcgactgaagaagtcagactacaaaacaaacacctgacaagagaagacacagtgatagatgttgtgaataaaactaaagatgcagaggagggattaattcagaacatatggaggggcagacctgcctctcaaggttacttcggcagagaactgaatctcttaaggaggtacaacatttgacagtcagaaccttttccagggagagggataccaagtgcaaagacacttaggcaggaaccagcaccatgttagagtgggtgagtgaggttagagagctttggaggggcagatcgtatggggcccttgagtctgcccatgggttttattcggagtcttaagggaagctctaaagcagatgttcctcccttagagggccgctgccagactccgcaccatgaagccacctgcctaggaccatggctggcccatagaaaatgtctaataataataaccatcattatcatattaataactataatcatgatatgctaacaatggctaaaaagagctgggtttggtaagcacacagagacacacatggtgtaactattgggtactttgaatgtctcccacttgcttcattttggtctcataagtaaacctggaaaatgtaaaagtgaatggacccttgaggaatgagctgggcctctactcttgtttctaacctttgggatgtgtcaggggaaggagggcctatggcaatctacaagagctctggatgacttactttgtgggaacagtatggggacaattgggtgaccaagaaaagcaagcacttctctcaagggtatgggtgtcataaccaggtgtaacacttcagcttaatctcaacgtcaaaaagggtgttcagccaggaatgttgaacgtactgcaactataggaaccaggaggtaggtttcttctagagagagtataatgagttgtctgaaatgctctgctctgcatgggttcatttcagtgaattccattgccccagaacatgtgtcattcttactctctgactgagaatatcaccttaattgagttatcatataaggatagcttttaacccaggttatgaggctgaatgtgatggtatgtgtgaatgactttggatacttgaaaaaagatattacaaattaaattttcttgaagatgtgtgcaagccatggtcattagtgtttcagatgtattggttttcatttggccctcatattaagcatatatatgaggttctttcccatccccatgttgcagatgaggaaactgaggcacacaggttaaagtcactcagctaattttgagtgtcagaggcaagaattgagccctcaagctctaacctcagtacttggctctcaaccactttgtaatcttaccaacaatccccagtaaagccagagtgtgttagagacaacagcttactaaggaggccctttagggggtgacctcatacaagatgtccatgcctgccaaaatgtctacacctgatcataaaatcttgtaacccatctaaatctttcgttcttaaaatgcaaatatgtatgcaagacgaaacagcaactcagaattacactgagagatagatgattgttgaaaccttctcaaggctgacaagtttgcagagaaacaggagggagaatacacagtcctacctgtagggccttagtgtggctttcaggctgactcagccacttgctgattggatgacctcgccggttaaggcatcctctttgagctcttgtttccttatagaaaacatgcaactaaaaacctatcgtgtgagatttttattaaaataaaaatgaaataatctatgtatttagtgcagtacttgaataaaatagatgttcacaggtggtaattattattattgtcattgttattactattattattactatactttgtatcttattgcactgaagatagattttgcttgaggcttggacctcaagttgaataaacaatcacaaagccagtccatcttctcattccagatactgttcaggggacattctttgaaatggtcttctgtgctagacttcaggctccatacatagatgcagggcccatctctctgttgtctcagggactttcatggtgcatagcacatgggtaaatatacaataataactactactaattgacaatgaagaaggatgtctttttccaagggaaaccaacctatgtctacctatttcagctaaagcccccatgaaagaaagctgaggccatccctggagcatgtttctgttttaaaatctggcatgagagcatctcctgtgaagactcctcctttaagacagtcataaaaatacctcaatcactatgtgaacgtggataatgtaagtcactgcttacattgagaatttctaatacttctcccagatttaggattctagaactttataatttatgactggaacatctgtacgtttacctaacgttaagaggtagctacaggccgaacgcggtggctcacgcctgtaatcccggcacttttgggaggccgaggcggacggatcacgaggtcaggagatcgagaccatcctggctaatacgctgaaaccccgtctctactaaaaatacaaaaaaaaaattagccgggtgtggtggcgggcgcctgtagtcccagctactcgggaggctgaggcaggaaaatggcgtgaacccgggaggtggagcttgcagcgagccgagatcgcgccactgcactccagcccgggtgacagaacaagactccatctcaacaaaaacaacaacaacgacaacaacaaaaaaggtagctgcaagtctgaagaaaaataggtgtcaaaatctgggacaaagaccactgaaatgagaaaggtcttggggtccagccaagagaggtaaggggagtaccagggaaacagtcttaatttgatcaacccaagaagacttcctggaagaggtggggccttagggaggtcttggtacagtgggaaggcttagcatgcaatgtgaattatatggaggaagtcactctaacaactcaatgcagtttggaaaagggttgggatcaaaatgaggagactgaacaaaagaagcatcacttctattccttctctccagtacttcctgtgagtaagtcaatggaagaaaaagcttttccaactataggcccctccattccactctggccaggcaactgcaaggagcaataaaacttcaatggctcccagtgggtcgattcggcaagaaggaaggtgttataaatcttgcccgatgcttatgtgcagcttaaaaacaaacggctccaatcacacttagcagaggtagccaatttccccagcatgcggatgcagcagaggaagatttacccacctgcacgactcagcggaagaagaagtttgcgagagagaaagggaaagaaaggtcaagctgcggaatgaatgtcgacgatgttgcaatggatggtttaatgcgaagacacggcatacacgtggccctgctgagcatccatggacaggcagcagagataaaccatccctcctagtgagatgtgcccttgaagacacatttctagctgcagaatgacctactggcattgctcctccaagcccatggggagggccgcctgtccctttggggactcctgtcattgtggtttgtctttcagcagctctgggcatcttactaacccgtgcagaccgatgatatataaacacaggtttttgtcagtagctgtcctccatgagctccagaaacattagaagtggaagtattaggaagcaaaaagcctttattcagcagagctccccaacccccagttccaaccatcctttagctgctgagtcttagctctcatccgctgagcgctctgctgagccaccatatccctccatcaaaaagcaggacgcgttccaagcatgcactttgttgaaagaaagtttgttaatgaaggtcagaaaaataagcctagaagctacagaatgcattacaaggcactctcagaaaagcaatgttaccatatgattattaataatattaaaaattacaataacagcaagaacttatcaatgcttatcacgtgtcagacctagcgctaaagctccgttaagtgcattatcccatttaacattccaatcaatctgagagttaggctttatttttctctcattaccagattaagaagctaagattcaaagttcagtaattcagtaattcaaaattcagtaatttgcccaaagttacccagatagaaaaagaagctaagagcagaattaagataacccagtgccaaagtccataatcaatcactgatgtatataggaaaaaaaattaaagactatttttttcaaattacatataattgtaatatgcatgtgatatgcaaactaattaaatattaagatataaaattgttaaagttaatgcttactgagtgtttaccatatggcaggcactgtactaggcacttaacatgaattaacgaatttaatcttcacaataattctaagaagtaaatataagtatgaccctcattttacagctaaggaatctgaggattgactaggttaaggtatttatataagatcacacagtgagagaagcatccgagccactaatgaacttgcatctttctgatcctggaaacttcaccttaatctgccatatcttgcaacatgccaaaaatcacaaactgccgtattagcaagaatcttggcactaagaaaactgttctaaccctcactgcattaagcccaaaggagaggctaggaaagggtgaaaaagggccagaatcctaagaagaaggctggatcctgtcggaggtgactggtcctctggcacatggggtcacctgtcctccacacgtgtgcttcagggggacctgagccccagcctgatgcttctgctgagggctgtgtgcacttgttctgcagctcattctgaggcttgtgacttagctccaaggagttgccctttaaactgggaagtcaggaaagactgactccaagattaaggggagaaaaccaagaggaagtaagatgtatcattcgttacaggtttctcttagcagtccatacattgcaaaatgtgcccatggctcctgaagtacagttgattcttatttttcacaaattctgtgtctatgaatttgcctgctcaccaaaatttatttgtaaccccaaaaccaatattcatggtatgtcaccttagaggtaattcaaggatatgtgcagactggtgaaaaatttgagtcatcccaatctcattgtcccagtgaggttgaaggtggcaatgccctgccttcttgtttcagctcttatattataaacacttccttctcactgtctgtttagtgacttttttttttttgcatttttgtggatgatttcacggtttaaaacagcccctacatatagatctaagtcctctctagtgttcaaaagcacaagaagggtgtgatgtgccttatggagaaaacatgtgtgttagagaagctacattcaggcacaagttacagtgccactgcgtgtgagttcaatttaatcaatcaacaacatatattaaatgaggtgtctttaaatggaaatacacataaaacaaggttatgtattgattggtagacaaaaatgttgtgatcagaagctcacaggaacctaactgtgtatttgccttaggaacaatgcttcagtgttcactaacttggtgtttgaggtgaccttatagaccacagattatgagaatcaactgtactgtcggctttcaccccagagaatgcctggctacagcttaccatctttggtagctgtatggccttgaggcatccatgtaagcctcattactctcctttatagaatgatgttgaccacagtatctacctcatcaatttgtaactgtccagagataaagtgtgtagcatggcacttggcacccagtgggtgagaagctccgtggatcctagctgctgtgatggctgtctccagtatccctcatccaggagaaggggcaggcagtctcatgaaagctgtttctccaatttccttcatcatcttcagggtatttttacttctgaacataactggctaatcccaagaacaacccaggttctagaagattttctcctgtgctggataatacagaagattccaatgactacagctttggcaagtcctcttgcctgacacctggctcaggagtcttgaaggacttggatcacctgcttaagaagcaatcccctctcttccactttactcctatccaagtggcccaggcctgaggagtaggaagtcctctcttcaccattcccccacctttcctacactttagtgtgccctccactgtacccccatcttagtacaactcaccagcccctcatatgcaacatgtcctgttgactttcctctgccccatgcttaatccttcttaacacaccctgttcctggtccaccccacatcatgcctcagatggcatcactgggcttctggtctcgcaggctcataaactcagagccaacatattatagttgccaaattatgttaacaaaaatactctcccacatcagcgtctctcattctttttttaatttttaatttttaacttttactgtagtaggggtatatatgtatgggttacatgagatattttggtacaggcaatgtataattatcacatcagggtaaatgaagtatccattccctcaagcatttatcctttgtgttacaaataatccaattatactcttttggttatttgaaaatgtataattaaattatttttgactatagtcaccttgttgtactgtcaaataataggtcttattcattctttccaactattttgtaacaactaaacatccccacttcccttccatctccccactacccttcccatgctatagtaaccatccttctgctctccgctccattagttcaattgttttaatttttatcctacaaataaatgagaacatgagaagtctgtctttctgcgcctggcttgttccacttaatataatgacctccagttccatccatgctattgcaaatgacagcttcattgtgtatatgtactacattttcttcattcatctgttgatggacacttaggttgcttccaaatcttgactattgtgaacagtgctgcaacaaacatgagagtgcagacatctctttgatgtaccgatttcctttctttggagtatatacccataaatgggattgctagatcacatggtagctctacttttagttttctgaggaacttccaaactgttctccacagtggttgtactaatttacattcccactgacagtgtacaagggttcccttttttccacatcctgccagcatttgttattgcctgactattgtgtaaaagccattttaactggggtgagatgatatatcattgtagttttgatttgcatttctctgatgatcattaaggttgagcaccttttcatatgcctgtttgccatttgtatgtcttcttttgagaaatgtctatgcagatcttttgctcactttttaatcagattattagaatttttcctatagagttgtttgagctccttatatactgggttactaatcccttgtcagagagtagtttgcaaatattttctcccgtcctgtgagttatctctactttttttgattgcttttgttttgctgttgctgttgttgttgttttgctttgcagaaactttttaacttcatgtgatcccatttgtccatttttgctttggttgcctgtacttgtggggtattactgaagaaatctttgcccagtccaatgtcctggaaagtttccctaatgttttcctgtagtggtttcatagtttgaggtcttagatttaagtctttaatctattttgattcttgtatatggcaagagatagtttcactcttctgcatatggatatccagttttcccagtacaatttattgaagagactatcttttccccaatgtatattcttgtcacctttgtcaaaaatgagttcattgtaggtagatgaatctgtttctgggttctttattctgttccattggtctatgtatctgtttttgtgccagtaccacattgtttcagtgactatagctctgtagtacaatttgaagttaggtgtgtgatccctccagttttgttccttttgctcaagatagctttggctattctgggtcttttgtggttccatataaattttaggattgtttttgctatttctgtggagaacgtcgttggtatgttgatagagattgcattgaatctatagattgcttcaggtagtaaggacattttaacaatattgattcttccagcctatgaacatggaatatgcttccattttctgtgtgtccttttcaatgtctttcgccagcttttatacttttcatagtagagagctttcacttctttggttaattcctaggtatttaattttatttgtggctactataaataggattacttttttttttctttttcagattgttcattgttggcatagagaaatgctactgatttggggatactgattttgtatcctgcaaataaattatttatacaaataaattatttgtaaatttacttattagttctaatagttttttggcagagtctttagcttttaccaaatataagacaagatcaatttgactttttcctttccaatttgaatgccctttattttttttctcttgtctaattgctctagctaggacttcctgtcactcactcttatttttccacattcctatgagcaaatcctggctaagggacacgatttgtccactttgctattatcatgtttacacaggctctcaatctcttaggattatttaccccaaggctcaactcagtttttctgaatcactagtctagtgatcactcttctgctcaaaaacctttaatagtcctcctttgattacaacattaagtagtgcaagcctttcaagggatgcggtgataatactggcttaactttcacttatctttctctgctcttttgcatgtaaactacatacaagacaaatggcacattcaccatccttgagcacacccaccattttctcttctttgtatctttgtgtgctcaacctagattgcccctctgcccaatatcacctcctttataaaaccttttctgatttcccatccaaaaagtgatcccttacccttctgggccactatcaaatatttattcctacttctactgaggcatttactttcagctgtagtatagaaatatgtaggattggtttggcccctattcagactaccaggtcttgaaggcagaaaatgagtgtgacccatgttcatcactcctcaacaacgtgcacatagtagcactccatgtctattttttgagaaaagcattgattctggatgattttcctggcaactgaagagttgcaattacttgtgcttattttcaaacagctggttaatatttatgggtcatttccaagtgaatgtgagtggagaggggataaaaatgtaggcagtcttccccagttgggctggatcttccaagagaatggtctatgtctcttcctttttctatgtttcccttcaatacctagggatatagagtcactggtactcaaaaatgtttcatttatccataattttttattctcaagcaccaataagatgccactctatacttcaatcatccgagaaggatttgtttcactttattacattggatagagagacgaacagatagatgtacaggaaaaaatcatccctgttgtatttgtagcttatgtactgagcggacttcagatagtcctgctttgtaaagtctttaagcataagtcaaagcagagatcacctggagaaagcagagagagggaatgtcccaggtacctgagttgagcagataacatttgggcgatgcatttggatctgagttagtgccagctaaggcaaatggaaaggacattggcttatgccatttgttctctgaaaacagaaagcacacaaattcatcagccgagacagcattttccttggaaccaaacttaagcagaaacttactgtgagagatagtgtggggttgcaattgacagaatttataaaaagggctttgagtcatatagtagaaaaataccttcaaccccatttttataaaggatacagaaatgctgttcaattgccaggtctcatattgatcctttgaaaaggtagaggcattacattaaatcctgatttggtgaaggcatttcttcacagaagatgatgccatttacccatcattaatatggcatgttttctgaaatgttttctagtgacaatgatggatttaagtttatccaaacctatgctctcacctagtccctcttgtcgccaagggcaagctccagcagaaacctgtctgcaaggagacaccccatcagctgccactggaacaaagggaggctcacctgctgacctgggggatcgaaccttgcaaacatagacatctcatgaattatattggccaccacaaaattcagacctccctcatggcaattaagatttatttcagtgatgttttcaagcctcgtctctgatcttcagctttgatggagtctctcagctgtcctgggactgcccaatgtggtccttttggaaatcagctcctttgttatgtcccagcgtagccatttcctgtctgctcaggacagagccatctctcaaggcatcactacactgtacactcctcccaggcagtcaggatatctgtcttctttatactctgggcctactacaaaagtctggctcacagcagggacccagttaatatttgctgaatgaatgagatgcgtcttctctgttcctccaggagaaaatgtaaagacttttcgctaatattgcacctccataaattccttctctctattcaaggcgaaggataagactacaaatatctttttttaaaaaaaaaaatctaaagagatgcaaacaagaaatatgcaattttcaaaataagtttaaaatgacctaaatatctttgttattgcattcttaagtctatagggaccatgaagggtaagaaactcaagtcctcccctaatatttctcaaccaggcctccttcacccaattccaataacaaaaaatgcaaacaccaaccaatgctttttcatctcccggccagggtcccatgcctcaccaaacctaattttctattagccctatttctctcatgtgagttgggaatcactgttctaaaaatcccaaagaacatagatttacatccattctgcaagatatctgcagaaacaaaacaaaacaaaaacatgccagatccctggggacagggatatacctggtactacaactgttgaaatagttcttaacacaaaattgggaatcttggtattcatcacataattatttgttacttgcttccctttcttatctgaaataaatgttaggtatgattttttaaattccccctcccccagcaaagaaagaatcaggaaagtaactatgatataaaggaaaaaaggacaaaaggaaaaatatcctctatttttaacttgtgaatttttttggcagggactagctcaggcctgccatctctattgatgacgcgtggtggcttttgggcttaggaataagatgggcctgggtttgagctcagcactgctctttactaagtgtatgaccttgggcagtttgcttaacctctttaagcatcagtgaacttaatcactggatggcaaaaaaacagctaacatgtctaacacagtgctggatctacagcaagctcttgatgaatgccagccgccagcctcctcatcaccatcatcagtgccttttcctgccaccctctcacagtgcagttgcagaccaacctcattgccatggcacagcctgtctgtgaatcctcaggacagtgggcattcagcgaacaacacaaacacacataccccctctatccactcctctggctgaagaaaggatgcaagcagctggatacaaatggccattagtcctattctccctacaaatttaatttctcaagagaacagcagttcccaaaataacccatgcagagcattcccagacacagcctcatgctaccagatttctacttccttaagcagcatgtcatttctagatgtgtcttccctttaatccagttttcctaaatttaacagattaaggaagcatatatatatatattatatatatataaaatatatatgaatgaattgcttttatgcatctatctactaatgcatgcacacgtctgttgcatattgtattcggcaagctagactaaccttccagtgaacttagggtggaaaacttggtttggttaaagtaagagggccacctgtcttccataagaacatcacaactctgcactttagaattcattctctcaactatttttagacctattcattaggcagcttgggctcctgcccattactgcttcagcttttccgacccagaagttccaaatgcccagcaggagggaaataatgtcttctaatttagcctcaagtgaggaagttattgatgcaaatttgtagaatgttcaagttggacacaacttcaaatgttacaggtaatccacaactttcccttagcaataaatcgtgtccacttgatcctgaccaacgggcatccccactaatttgaattatttcagggagatagtttactcagcctcctcaaagcacttataagttaagcaacccttttaaggtgctctttgctccttccgctaaattattgggcaataagagtcaggacaatattttgcattcctatggtgtgttatgctcttctaagagctttcccagaaatgatttcatttgtactctaaaaacaacgctttgcagttctggaggtagatggtgataatggttgtacaatgagaattttcttaatgccactgagctaaaatggcaaactttatgttatgttaccacaataataaatttaaaattaaaaaatgtaaatgtagataggcaatattctaaagggaagtgatattctcaagccaaacaatccagctaggagcagtctccaattctctgttcaatgctcttcctcttaagtgatatggcctctggatcatgatacagcctagctcagggtacctggtttcagatgccatgactcaagttgggatcctaaggtagtaggttcctgagaaagctgctggacctgtatgctagctagtcctatgctccaaaaatgccatgcaatcaaagaaaaaataaaccagtgcccttgtgggacactgcaacccttttcctgctaccacccaatggctttcctgttaacaagcgtcagaatatggagaaaaggttatctcataagtttagttttctccaagtaataatccgagtctacatagcagcaatttccccaagtttagagcagaaaagtcactgaaaaataaataccaagaggaccaaaagttggagtccaacttattttaaatattagacaactcaatcacactctgctctttgtaggtaagacagacgtagtgtgagagtaaaatgaaataattgatgtgaaatatacagagttccaagaaagtaagataagaatcaaatatccaattattcagaccactataaagagatagaaaatgaataattcaaaagggcagaaaatccatatgtattttctgtaaaaataacaaagctttgtacaatattttacaatttgcaaaacactcttgcatgcattatctcatttgacttttctaaaaggcctgtgaaatgaactaatattattattataattttccttttataatggaggaaactgaggcattgagggtttgcatttttcctagagctgcagtctgaaagtggcagagctgggtctcataccacatcttctatttctaaatgctatgttgatattgatattattattaataatattctttacataagttgcaaatgggatattgatgggattggttttaatatgacagaggtttgggaaattcactccaaacaaaacaaaacaagacaaaaaaggactcaagaatagctgagaagatgtctagtttctctgaggctgactctcccactcaaaatctcacaactaacttcctactaaaaataaccattctcttttagacttgttctcttttaagctttcagtgagtggggaaatggttgagtgtaaaattttcaaaggcaacctctgggaagtccactgaagctggagacaatactcacagcagtgagttctcagtgcagcagccaggcaaattctataatagagttagtgctgattgtcaatcttgaaaatcaactgggccgcgagcaagtcaaactgcatagtctccatgaagatataaaaagatttcttagacagtgtatcttagtccattttgtgctgctgcaacagaatatctggggctgggtaatttataaagaacagatatttatttctaactatcctggaggctggaagtccaaggttgggggcatgcatttggtgagggtcttctgtctgcattgtcccatgctggaaggcatcacagggtgggggatagtgaaagcaagagtttcctgaacctgattttataaaaaaaaacccttctggcaataacaagcccacccaagataacaatatgagttcattcatgaaggcagggccatcatgaccaagtcaactcttaaaggtcctacctctcaacattgttgcatcggggatttagtttccaaaacataaactttggggaagacattcaagccatagcacagtgcattacaaggattttaacaacctagatttctagagaaatctagagaagcaaggcagctagctgtaccatatagatgatcaggatgatcagtctctcataatcacacagtttctcaccttggatcagcatctctttgaaaggaccaagaaatattttcccatttatcataaacatgtacctttcctggagttataaaagtacccaatctcctgggtcgaacaatatggccagaccaagacagaaagcagccagaacctaggatgagctggaagaggttgtccccacacagctcaggcttctgctccttctttgactcataactgaaaactgctgactagactgaccgtatggtttctgccctgcccgcatctgcagaaactctaagccatgaaagcacctctaagccactggacccaagtcgccaaggccaaaccaaggtaggagatgtaatgataaatcagcccaagtgctgattttctcctctaacttctgcccaaactggtctggaatatgaatccaggaaaatcttaaattaggattcctactggaagtcttcttaaccatgttctttctgtgactatatggcaattgctggcttgccttctttaccactacactctaggctctatgaggataagagatgccaaatttttgtgcagtgattaaagagctctggaattagattacttaagtacaaatctgggtctctaccacttactgtgtgaccttaggcaatgtgtaaatctcactaagcctgtcttatcattagtgacatggacttacctaactcaattattgtaagggtcaaataaaatagtatacttaatatattgactggcacataacaaagacttcataaaatgttactcattgatcttactcattgtcttatttaccattgcatccccttcctagtatagtacttggtacacaacaggccatttgataaatgtttatgagtaaacgtctgttcaagaccaacacaatcctatataaatatatacataccataccttgatttgtttgcttagtttaatttttttctactttgagttatcaaatattatttaaggaactccagggtcttgggaagggatcagctgagggagtaggctaaattggacagaatgaaccaaaggcaggttactctgtctcatggtaacctcttaggagattacccttttatggcgacctcctttccatttactgcattgttcagggtaatttgatatacaatgttatcgtaccaattacatgttatatcaaaattgaaaggaaattggcaagttgaattggataaatatgtccttttatttaatttcaaataggtggtacatagaacagacaaattctacttccatgaaaactattttataattgtgtattcacattaatgatctcatggctgaatccatccaattcaacaagtgtatgttggccaagatctactaccttccaagcactctcctaggtgttgtgttagatgtatacacaaaagataaaacttagtctgcaaattaccataagtagtgttgctttgaaccatagacatttattctctcacagttctggaggctggaagttcgaagcccagttgtttgcagagttggctccccctagaggcccggagggagaacctgtgctctgcggctctgctctgtgcttctggtggcttgcagacacatggctccaatccggcctcagtcttcacacgacgccctccctgtattggctgtgtcttcacatcctctcctctaagtgtacctttgtgtccacatttccctcttcatgtaagaaaactggccactggataagggtcctccctaataaggtatggtctcatcttaacttgattacctctcccaagattttatttccaaataaggtcacattcgcaggcgcgaggagtagaacttgtacctatctttttgtgtgacacaattcaacctatgctagaactcttcaggatggtgataatgggaaaaggtgccctttacataacaccgtgtgccaggcatgcctccacctcatgtgttatccgtctaatcctcatgacaatcccaaaaagtaagcaaattatcctcctactcattccacagacagggaaggctaaagagataaagcaactttcccaaggttacatagccagcctcttaaccactacgccacactgcctcttagagcttgtagagaagaggtcgattgagtagtaacgataagagaagcataaaccaagtatcacgggagaccagaggaggctgatgcagctttagctagggacattagaattaggcttttattttattcaattcaaaggtaaacaaatattgccagataccagaggcagtactaatttttgaagatacacaatttaaaaaataaaaacaaaggcacaggccctgctttgatgaagtttagtctagagcagaataataaaatacaaacagataatatcaatgcaatgtcttaaaacgtatcataaacatatgtagaaattatgggaatcatagcaggaaaatggaacttgacattttagagtttcattatgtctgtgtattttccaccctccaaattagattataaataccttgagatcttccgtttcttttgtattcattcaaaacaggcttttacagttctccctatacataggacactcagtaaaagggattattaaggacgcttgctcaagcaaggatgtaaaaatgatagagcaaaccttgttgtcccccaaatccttggctcccctggctggtcaccacccccaggagaacctagggagacctgtgggcgttgagcagaagctcacagtgtcccctctgccagagttctccagcaaactcattttgacagggcgtctgggctgaatctgggggcacataaaatgccaggcagactgtgtcttgcggccacagatttggaattgcagctccttctcgaatgcccacacttctttctcctgctttgcttttccctgctgaatgggttacaagtagatttgggagtttttgtgatctgtatgtttaatttctgttgccatctgcatttgggtcttccttttcaacaagggacacaaatccagccaccatcagaaaaaggataccctcggatagaagacccagggattccctgtcttcatgcaaatctgctgagctcttccttcagcctctctcctgaactgtgttgtttcttttgcgtgatctggctctagcgctgggggaagcagagctttgaggcttcccatattcctgccttgggccactgacagggacaacagcatctgatatgtacccttctacaaaaaatcttctgagccttcctgatcagattatgcccatccctgaagcagtgattgtttcctgcctctgaacctaatgctcttcttcttacaagccctccaaatctaggcccaatctgccacttagttaaagagtttcatactcaaaacaaaacttggcagaaagtgcagtccaggcaaggtagaggcatgacctccgctggccacttatcaaaaaagaaattgttttctcccttcccagctctcccttcagtttgtttctattgctccttttgtctgggtcttgccttgcttccacttgtgtaatcagtcggtccactgggtacggactgtgtctaattgcatgctgtttgcactgcctagcacattacagtcctcaataaacatactattattatgattattgttatgatctatcataacaataatcgcaattcagtgcacatttctctaaacttcgggcagcttggagagtcaagaacatacacacagtcccctggatagccctaagagctttggataaggatctaaatttaaggggtgcatatctgagctgcacctccaaacctgcagagattggagggtaattatcttccatcctcagtgggaacagaccatgagaccattctccttccatgcagaaagggagaataagaaccaggcagagaccagaaaagatagagaaaagagaaactgtgttaagctgtagtttttttcagagacagcaaagaccacagctagggctgacccagtggcaaaaagtctgttcaagcaatgataagaaaaatcatttactgggcacattaacttaagttgtaggagccgagctttccctgggttgcccattggataaatgctgtcaggatatgctgtgagctgctccaatgagatgtaataattgaatttgttttcatttaatttgagggcctttaattaaaagccaggcctgtgtgtgcagagagataaagccaggcacatggagactgggggtaatttgggtgctgaatgcaataattgtaaattcagaggtcaggggactggcactatctttgtgaaatcagcacagtgagcaggccatccggctggaatggactcaggagtggtggaaacacacgcttaagtgattttttgaaaccttaatcgcaattacagagtagtgtggaggttaatttgcaaagttcattaatcagagaaataaatacatcagtgatcacttgatggaagacaacctggaaagtctggttttccagccacaatttcccaaacctcctattcagttttgaaatagtacagaatccacactgtgattaatcttgccaacctttattcgcctttgaactgctaagcagtatatttctcccctctaggtctgaggttaaacccatccacatgaccacttcaaaataatccaaacatgtcttggaatgatggggctaaaactgagaataatccatagaataaattctggcatttcctattagcactcaaggaatcaacagctagaattagtatcagaagacagagttagaattaatgcccaatattaatccctggagttaggattagagggttaactagagtcttcaatctttagatatagttgtaattcatgatataaagcaataaagtaaaggttttgtgcgtacatgtgaattgctgccctgataaatggcattccattagatgcacattttgtgcttgagagagcttcattatggaaacttatcccggcatgcagtggtggagtttctagaaggctgctcccttccagtctccccagcagggtggagagatgggatccacatccactccactaccatcaagcagaagaattcacagctggtgagctccctgctgcaaaagatgggttgccacccaatgcaaacccacacgtgggtggcacctgtgcccagacatgtttctggaagtctcctgctttcagcttatttttctctgggttataattgctccctagagaaaggaggctgacaggtcagagactgtggtcagagaggaggagagtggactaggtcagaaagtatctgacagaattgcctgatgcatttttaaaaatacccatgctttatcctttccccagacctcctgcaccaggattctcaagggagtcaggtccctggtaattctaaatcaccctcagctaagaaccactggactagataaactccaagctctcccctacatctgaagtcatgttattctgggccgcacttctgggagctgtacatccactgtttgcttagcaatttgccgtcctagaatgtgcagtaagccctctcttaacatcatcaataggttcttgaaagccgtgactttaagtgaaacgatgtataacaaaaccaattttaccataggctaaatgatataaataagaggtaaatttcaaccgcatgttgctggtcacaaaaaaaaaatcaccaaacttccaaataaagatccaaaacagttctactattaaactttgagatgcgtgtgagcatatacatttaagaaagattaataaaaacagtaagataatatttacccagtctttggtgaatcagtgagtgacagtggtcacaatggtggtgaattaaatcaaggaataaacgtttctgcagtgaaaattgttagggcatctcctactaccaccaagttctaaaacaaactattagaaagatggcgggcttgctgagcactttcatacctcatggtttattgtcatgcatttggatgattactttagactttacaacattttatttgacagtaatttgtatacattcattcattttccaacccagttattctagttcagggtcacaggtggctggagcatctcccagcagctcagggcgccaggtgggagtcagtcctggacacgacaccacccagaggcagggctgctcacactcacccccacactcactcagactggggccttgtacacatgcctatccacctaatatgcacagctgtaggatgtgggaggaaaccaaaagaccctgagaaaaccccaccaacaccaggagaatgtgcaaacaccacacagacagtggcccttccaggaagcaatctttttctcatcattgttataatgaaaagacatggaatgagacaatgcgattcaaagacctgctgtaataatagagtctggggattagacactttagttcaatcgtctctcttacaattgaataagctctgttatatctctgccagccattgtccatcctctgctgatgccttggttttcactaaacttagatgccagacttcctgggtgtctctggacacctggaagacagaagcagtccctcgtgcattcctgagcaaagaacaggcagctgtgagggggacgagcgtgggctgtggaaggaaggaggtggtaaccctctagagcaggcatctctccccagaggaaccaaccaacgcgtcatgatacccacttcgcagatgaggaaactggggcacagagaaagatgacagcttgccagaactcatcttcagacagcgcgactccagagcctgagctgtgaacttacgtcaccaaagtactgttcccaattctcactccagggctctctggcagctaagtggtgagtttagaaaacttgacagaggaagtaataatgtggttagaggaaaatttagaaaaagctttaaggtgaggtgtaaaaaggctagtattgccaatgagaatatttactccataaatggaagctaaaagcatctagtctcccagtgggaatttaagcatcatcgacaaatgttcttttacactagctctaatcactaccgctgagctcctgctctgttccagatgccaggggtcttatatacattttatccagagagttttctaccaaccgtaacagctgtgactattcccaattcatagctgatgaaactgagatttggaccaaagtctcatagatactagtaggtctgatgtctccataacctattcagaataagaaatttcatttctggagttaacttcttaatcaaacagtaatcaagtgataatcacctcctaagcactatgcaccatgctaggtaccacagaacacaggtaaagaaatgaagaacatctttgttcttatggatcctgcagtccagtcggggagagagacaaacagaatactccatattgtgtgatgcagtctcttcataaggagaagcactgctgctctgagaacacacaggcgggtcacatagctatctgcagaggtgggtcagggaacaagcagaggaaggacgtgctagaaggtgaagaaggcagtcaggaagaagctgattgacaggacaacatatgcaaagcctgaaggatcaaatgagggcaattgagctctgaaagctggaggagcctcatgtgactagggcatagctacggcatataagtgagtggtgacagctgacactggagcactggttatatttccagctaccccaccagcgcccagcacagtgcttgcagcatagactgtcagtgctttatagggtgaatgttagaaaaataggtgttggttggcatcaagattccactcctatctccaagtggcctgggctgatggttgtccaaattcatctgacgaccctaatactcccatctccataaggtcttggtacacttatttttgggtgaacccagctctggctatgactacatctgtggttgttgggaggcaggaggggaagatgcctttgcactcagccccgtttccaggagccatgcactagctgagtctttttctctaggttataattgctccctcgagaaaggctgcatagcatgctatggtttccttttctctctgggtctatttcaggaactggtttagaagttgtggggtttttgttgcttttttttttctttgagtgaaagcacacgttaagaaaaaaagtaaaaaaaaaaaaaaaaaaaaaaaaaaaaaaaaaaaaaaagacctctctttcccatcagctcttttgacgttgctgggagacaaagcaagcagtagcaagtctccaaaatgggctttaaagaaatatatttaaaataaacctctaaagcagaacggcatcacttgacgacatgttgtacattctgattcttctccttctgctgcaagagaaaggctttcttgggcctgtgaaaaggtaactgagaagagcctcatttaactcttagagaccatgggaccacccattccaatgacctagactgaaaaatcaggcatggtgcccaaaagttacccaatacctcccattgcttcctcaagcatcttcgcattttgatctcccttggttagacctgtggctggcatgtgtcccctcacaggaccctgaggaattagacagatattagaggaacaacaaatgaagaccagggaggtcaaggtgatgctgggacctagacaaagacttcagttcccccagttcacatggaaccaatagggtccctcaacttcaaggactaaagagggcatgaataatgggtgcctcggtggtacccactgggaagtacacatgagagagctcaggggggtacaggcttaaacttggatttaatacgatttaatttttcttaagtggatgtcacactttttccacatctgagtttttggagcaatattcacacccactcctcctttcctttgaaaacatgatcaagcatgccagcgtggctctgaaatgccttcccctaacagaagagggccaggcccagggaggaaggtcaggccagaggtcatgggaaaggaacccttgggaagaaatgcagtcccaggcctggccagccctaactctggggcaagctcatttacagtggccctcacacagttcctcaattctgggtcctgtcacctcacagtcttagaagcagtcttcatggctttctcagctgcagcttcaagtgctcccaggcattattccatgttcctctcacaacacacatgagaggaggggtggccaaatatcctcatcccatttatcaatgagcaagtgccaggctcagccagtgaagcccagggtgtagctcgaaacctccgagtcccaggtttttctatgcagctaagctgcttgtggtggaagatcacctaagagccttcctccacttcatgagaaagtttttctgtttattgtctttgactgaacatcatggatttgcatgtaagataaaaattagggaagggaagtggcttccccccacacgttgacaatcaggaaacatttatcacctcttgccctgaatgtcatggaggcagctacttatttgccaccccctccagatctgtctatccatttaccatggtggtaatcagagttccaagaggaaacacgtggcacattcaaacggtctaatttgaggagaatgcaacactctgcaaaagcaagggcagaatacaagcaaatcccaaggtgtgatgaatgcagtctctggaactagtaactccaaagcactttcatcatactaggcctgaagtaggaataatcatgagaacagtgacctgaaaagaacaattggagaggcccacctaggaggggctgtgatctttaattgaggagcacagctgtcccacagtgaggccagactaggggaacaagagaatcaatacccagacctcaccttctccctctaaatgtctgtcactgatgtctatgggtcaaaccaactggaaaccagagggtcagagagcatgtggcatgggcacggttcacaaaggtcagtttcctgggtgcagagcactttagaggtggatgcagatggatatccaacagcaccttagtcctcatcatcaacctcatgatagctattcatcagagagtagaaccctaccatctgaggggttttttgagatgtattttctatgaatgagaacttgtcgcattaccaccaactcagctgatacagatgaaaaatagtacacgtatgcccctatcctctcttcatacacgccaataaacttttccactgtagtctgttgtttgtagtttgtcactgctttagccctgattttgaaaaggaaagtggtaaatgagattggaatcaagtagccaagaaagtgtgcctggaaggggaagagagagtctgagaagtctcttttttgagtgactgttatgtacaggacacactattctaaaattagcaaatttgaccaaattgaagattgtgaaaagactgtttttcacagaaaatatctcccttagatgcttaaaatatcttccttcaccctgaagaatccacaagtcttctttgggaggacttacatttctgtgaaatcaaggcccaaatgagaagcaccatcacacaggttgatgagtgcagctgacccatagaacttctgcaggaagccagagcctgcaagaccaggacacgggactgtaagttttaaggggatggtggggatgtggagggcagtgatcacaggggaaatgagagagcatggagcattctgcagaactgatcagatgttgtaggggctctggagactttggagaagccgggagaccgaggggtaggagttgttaaaattagcatattctcactcataggtgggaattgaacaatgagatcacatggacacaggaaggggaatatcacactctggggcctgttgtggggtaggggggagggggagggatagcattgggagatgtacctaatgctagatgacgagttagtgggtgcagcacaccagcatggcacatgtatacatatgtaactaacctgcacattgtgcacatgtaccctaaaacttaaagtataataataaaaaataaataaataaataaatatataaaaacaaacaaaaaaaagaaatagaacaggatttaagtcacaatttactccttcctggtttggcctaaagcaagtctcaagtgaaggacaactgaatggctcttctcccttcatcatgaggttcgcttcagctgatagaaaactgggaagttttagcctgcatgtctttccctctctttgtcctccttaactccaagcctggggtcttatccaggatgaaagctaactttatgctcctagaactgtgcttaattaaacattttaattaaaaccgacaagagtgattgtggctgtcaggatgtgaaaggaaagctgataaagttccttgcacccagtccaattggctgccagaggacatgctgctggagagaaggcggagagccctggagctgtgggacccagcacaggagcactgcagtccctggaggagctgcctctccagccaaagagcaaaaagcaagagggaatgttccctctcctcttactccctgaggctacttccatatgtgtgtgtgcttagagccaggcaggtttaagacagaagaaatacaagcgtttacagtcattcctgcatttttcctttcaacagttacttacctacagcctactctatataaagcactctggtccttgctctgggcatgggcgctggaacgagcacgtcagaatgtgagtatgctgaatcatggggcgagagaccctaaaaaagcctccatggtttaccatggaacttcttaccctaaaacatgtatatacgtggttttcatccttggccagcatgaccctttctgagatttaccaaaatcaccttactggcttttttgaattatgccccaggttgtcaaaaattccaatacgctattctgagatttgcagaagtgtgttaggggattcctaggggaaaataacccacgccacagcctcgccttgctttcagtcattctcccatcatgtatcagaccgagacctagtgggctgttgtcagctatagacataaatcctggttttcaggtagagagttgacaaaaataaactgaaaatcactgtcctaaagcaaagtttgctttacacacaaacctcccacaagtcaatctggccctgtgcatttaggaatccatctaatcccgcaggctttgagacgaagccagttctcaggctttgacaactccccatgaaacccagttaacagcttggattcacaaatcccccgttcccagctcttccctgccacatcagcacagtgacgcgaacagactgtgccatttgaaagcacttccctggtgtctctcaaccccagtattctctgcaccgtctaccccttgctggctgtgacatcctgaccttggagaatttgtcaccctagaaatacagacatagacataggcccaaggagtgacatctgttgctaggagtgatcagaagacaaaaagaaaatgtggtgcccagcacaggggaattacttgatcaaaacccgcctcaacaactcaattcaacaagacaacaagaattggcatgttctaagtactgagagagatgtgaatttgcgagttatttagagcagtacttctcaagctctttcatagaaataacctgaaaaccttataaaaagcagatttttggccaggcacggtggctcaagcctgtaatcccagcactttgggaggccgaggcgggcggatcacgaggtcaggagattgagaccatccagactaacatggtgaaacccagtctctacaaaaaaatacaaaaaattagcccggcgtggtggcgggcgcctgtagtcccagctactcgggaggctgaggcaggagaatggcatgaacccaggaggcagaacttgcagtgagccgagatagtgccaccgcactccagcctgggtgacacagtgagacttcgtctaaaaaaaaaaaaaagcagatttttattctccagatctggtgtggagtccacatttgtaatcactcttttcatgtcagggatttagagagcaatacaaggcataggcagtaagagacagaatggagttacagtcagggagggtcaaccaggaggaggaagaagaaggcccccatccatgatcagcagaacaatggcctctcagaggcatctgtgccctgatccccggaacctgtgcatgtggtacctcacctggcaaaacagactttgcagctgtgattaggagtatggaccttggaatggggagattatcctagatcatttaggtagtcccaatgtaatcgcatgaatcctcaaaatcacagaggctttcctgagtcagagagaggtcatgatgagaaggagtccatgctctttactgccccgtgatacggaagtccatagcacggacaggacaggagagaggcctgcagctgatgctgggcccagctgccaactggcaaatgaaacagaagcctcagtcttgaaacagcaaggaactgaatcctggcaacacttgaacaagcaacaaaggtgattctcccctaaaacctccgaaaagaaacacaggcctatcaatattttagttatactccagccagacccatacgagacttctgaccaatggaaatataagatagtaagtgtctgctgttttaagccattaaatttggagtattttgctatagcagcaacacaaaataacatactgcctatctgactgccctgcaaacatcttcaagataaaaaaaaaactgatcttcccacttctagtctctttctataattgatggaccatacacagcagctagggagaggtctctaaaattttgttctgatcataatcctccccaacccctctctaaaattctttaatggctcaaacttcttgcagaaataaagatgtctgtataacttcccttttctcagttatccagtccacctctgcctgtaggaccttccttccagtcaaataagctggactaactctgcctcatggctcaataccatcctattcagacctcacctcctctgggaagccacctctaacaccttgccagtgtgccaggtgcctgataaactgctcctaatcctgttgttttagcatctgtcaggtgactgtccttgttcatctgacatctgaccatgagctccttgagaacaaggatagctgtctctctctctcttctacctacacctcttataacaagtttccagcaaatgcaggttgaatgatcacccactgtagtagaacatgaaatatctttgatttttttcctggctcctgtcacggaactcctaaaacccttggattatcctgaaggatcagagagtgccttttgttattcataatgagcccctgtgataacacctgattttatgctaaagaagtgacaggatggggccctaagatagccttaaaatggggccagtctctaggaagaacaagtggattagagggttgaaactttcagccccacccaccaagctccaggaaaaggtgggtgggggctgtggattaagctctataaaaactcttgaaccacaagatttaatgagcttctgggttgctgaacacatggcagtgcctggagagtaaggtgcccagagagagcagggaggctgtgtaacccccaccccacatcttgctctatcaatctggtctgttcatctacatcctctgtaatgtcctttataataaataagtaaacattaagagagtgtttccctgagttctgtgagccaccctagcaaattaattgagccgtaggagggggttgtgggaatccctgattcatagaagtgcaggtcaaaacctggtgctgcaattggcatgtgtgaacacactgggcacctaaaagggacatgatgctttaccaacaatgtctggtcttcccagcaactctaaaaggcaggcatcattatctgcattttttcagatgaagaaactaaaatgtaaagagaatgcataatttgcccaagatcacagagcaagcaagtcactagcacctggattcttttatttatttatttatttatttatttattattattatactttaagttctagggtacatatgcacaacatgcaggtttgttacatatgtatacatgtgccatgttggtgtgctgcacccattaactggtcatttagcattaggtatatctcctaatgctatccctccccactcccccgaccccacagtagtccccagtatgtgatgttccccttcctgtgtccatgtgttctcattgttcaattcccacctctgagtgagaacgtctatacccttgttactaggaaattcgggaggagaccaccaattgaatatttactaaattctatgccttgtgtaaggggcattgtatatgttatttaatttaagaaaaatgtgaaaaagtggtaattgaggtccagagaaagaaatatgtaactctttttcagaaaagcaggtaaatgcatgctgataacaatggagtaaaaataaaaatataggaaaaaaaaacagaaaagcaggtaaaagtttacacaagctttgttccttgcgagacgtaggcaatttcctctgatggagaagaatggggagaagatacagggcagagagaactgcttgaacacagtgctacttacaaagtatgccatctgtggttcggaggactggtaagaatatggcgtgaagtcgaagacagcaggaaacaatcaagaaagactggaaaatactctcgcctgtctgccatggcagggtcttcgggtttccacctgataggtgtggtgatctgtatctagtttttaagaaggccaagtacaaggtcaacaccattctagagtgacatgggaggtttatgaaggaagggttcatccagtcataatgcagactagatttgatgatgtctgcattcaataggggtaaaaaaattcaagaactatttcagaagccacctaaatagattggtgattgattggtggtttttagaactgaggaagagggagtcttaaatgactttggtgtttctagtatctgtggttgggtaaaagataaaataatagtcataaaacagcctttgcaaaattatgacagtaggagaaacctgacatagttgactctatcttgcttctaacctccaaactgtccttggtcattcctgggtgtgggccaagcttactctgggagaaatttaatttatagtttaatcttaaactccttaaagtaaggttgataatagcccttccccaaactaaactgcctttgtaaaattaatgaaaggccaccagtttagagttatgagaggggcatgaattttgctaagatgtaggcgtggttaaacgataaccagccattgttctgtaggtcataagatttgtaactttcccaattacttttatagataacatcactattttagaacccaagattgaccttttgagatgtcttttcagactttgcatttctgatgaccagctgactccacctggacctgcaatttgtgactcaacaggtcctgtggccccacaggcacccagagactgactcagtgcacaagaaccattttccacacacctatgatttcattcccaataacactcctgttccctagccccctgcccaccaaactatccttgagaaatcctaaccttcacctttggcgaaactgatttgagtaataactctacctgccatgtggctagacttatgctaataaaactccttctctactgcaatagcacagtctcagtaagttggctttttctgtgcaacgggccaggagaccctgtgaggtaattacagtcatagttgggagagagtatatgagtttggttttgaacatgtggaatttgtgaaacctcgagatgtctggtgtaaactggaaaataggcatgaatctcaggttaagtcactgatagtgatgtgctggagtcagcttctacccactcgtcagagcttattgctaaattttcagaaattatatgagccaattactaaatacaaccactaataaaagttgagttatataaacttttgattaaataagttatagcttaaaaggcaatgaatactcaaaagccattactttcaaattattttactattatctgagctcttaaggtaatttctgttcattttctctatatggtgaaaacactgtacaatggtttgctactgtgcccccttctgaactctgtgtttgtagcctaaaattgaccatggcgagcatatttacaccatgaaaatcagcaaatgctgcaaatcaaggcttgactgttttttttattgtctaggcttaagaaagacatagagaaaatgttaataataatagagattaaacttaacattctatcatgtctgtaaccattacattgtgaatagcacaaaaaattcaggaaatattgtttgactattcaaaacctattatctaattcagcaaagaagttactcagtcattgacaacaaaagaagttctaacatgtgtttttgttgttttactttagcatattcaatgtaaataaaaatatcaaccaacacccatgtcggaactacacttgttcatcataaattggctatggatacaagaattttgcaaaaatcagggaaaatattctatgagaatcaattaagctttaccgaatttccagtaaagaatattgtggattccttatttgaaaataccgtgctagagatcctttatgtcagtaaatgttatagtaattaaatatatacacacatacacagacaaacacacacacaagtactttttttttttcctcagagatctgatagttaaaactttaccagcacaatgctgcaatactgatcacagatccaaagatactcctgaacgtctttggcacgaagtgcaaattaatcctagccatggagaagatcctttttagatatcctttgctgttgctttctttctttaggtctctaggacagtagttggttctttttaattaactctttgttcaatgcagtatatcagttgaatttcagtttgttttcaatttttgttttcctctcgtatgcttcttcttctttaggacttttattttttttctggcctcattggtgttaacaacttattctaatttagatccatctgcaaacatcattaacatgctatttactccctcattaacactgaaacattattatttatcactatctgtggtaatgatcatgggattaagggtatggaggctttaagaagttttgattctaatcaggaagttgaaaaggatgcatctaggcctaccctaaattgtccagtggcatgtcaagggcttggggactaggtttaaaaagtaactagaattcagccttcaagttgaaattcaatttttcccaatatggtattatttgaaaactagaaggaacatcgggagatttcatgccaaaatattattggtcctggcagttacaagttccatttatatgagcgtctcatgagccttcaaggaaaacagtaaaaaggattacagtggctgataattggtcttgaaaatgagatttttagtcaggtgggtgcatggctgggaaaaaaagctgcaggagcctagaattaaactaaaataggagagaatcatggggtgtagattttgtcctgagatcaataatcagtagattattggagggcaaacataatctgcggtcagcagggcagtgttaccaaatgttctccaagctaactctatttaactctgttgaataatgaaattttagtaaactgtataatgatagctctcagttgcaagggaaagagcaatgcgttccaagaagcaagatcaaagcccagctgcacaaagtcagcccacattgccaaacgtgagtggaaaggcatcatttgtagaatgtggtcagctgtgggctcaagagagtgaatttaagcagtacaggaaatgattacaagccatcaagatggagaacagggtgtcactcggagaccagaagaagagaaatcaggcatttcgttgtgtatgtttctcactagttgctcttgttagggctcaaagaaaaaacggaaattatcatttctatggctatctacaacactttaattatttttcctcttcggatttgaacaaattgttgcaaactgtagagttgggattgttgattcagcaacagagataaaattgaaaactgggagtttcaacctctataaccattgaatgttaaggctcagtcattcactcttattttgtttcttttaggtctaaatgaaccctttatttattgaaacttgccttccttattgtgtattaaggaataaccaagataaacatcctagcaaacaaactgtggcaatgacaccaacagtccttaatgctctggatatcaattgctttcgagtcttccagctgagtcctcaggcaccacagagcagaaacaagccatccctactgtaacctctcggaattcctgacccacagaaacagtgagaaacaataattattgtcagtttaagcctccaatcttgggagtaggtttttatgcagcaacagatactaacacagctctttcttttcttttttttaaattatactttaagttctggggtacatgtgcagaatgtgcatttttgttacataggtgtatacgtgccatggtggtttgctgcacccatccacccgtcatctacattaggtgtttctcctaatgctatccctcccctagccccccaccccctggcaggccccgatgtgtttgtttgtttgttgttgttgttgttgttcactccctgcaaacaaagggctcttcagtcctttactgattttatacctgagagcccctgtaccagggatctgagttttgacaagtgtgtcgtgggactcaccactaaacacgaagatatggggcaagaattccataattctttttctaagtttttcttcaaagccatactaggccattttttctctcagaccaaagacattatatatatatatatatgtatatatgcgccagttcaaacccttgccccacctctctatcattgtggagaggagtcttgggagaggaagtcttacccatgttagcttagcgtcttgctaggaaccactcatttctgtttttagagacggggtcctgctctaccgcccaggctggagtgcagcggtgcgaacatgctcctcaaactcctgggctcaagcaatcctgctaccgcagcctcccgagtagttgagattatgggtgtgaaccactgagcccggccactaatttccttttaataattattatgtcatgaggaaatatatgcaaacactctcaaactttctcatatttccagtctgtgtaacatttcaaaaataatgtattaataataaagtatttatgatttttatattacaaaataaaagaaactcttttggaatcagaaagtattctcaaacccaaataattaaaatcctgattctacacataagaaatctgaggcttaggatgaagaatctcatttgacatcaccagaaaatagctggtagcagaactggggctagaacaaaatgctctgatggcatgtcatataatgagacagtgtgtacaaagtgccttacttccttcttccttctccactgtgccatccaaggaacctctactgttcctcttacttcctttagatttcaacttatgctctcgaacgtgttctccagaattgagaaatgggcttctatttgcctttcaggatcttataaccattcatcctctttcagaatttatctttacatcttgaagaattttaactttattcttcagtactcaatcatccccttgatcattttaattgcctcattctagagtttttctaccttattcttgtcttcagttttagcaattggaattttaggcagaaagaatgaagttctgagggatttccacctgacaatgggcatctgttggtcatgtgagctagctgcagataactgagagtggacagtaactccaagcttctttccctaggtaggagataactcagagagttccgcctgcaatgcatctgcaggcaaatcactgaaattctctgcactctgttaggctcctggcaacaagcagtcatagaagctcccaaactggagaaaagaagtcctaacgagaagtcctcaaaggaatttaattccttggaaaagcagatctgtgaaagataggaagcaatgatgaacccaagaggaataaacacctttgctgagtggttgtggaattctcagtgttatttgtggtgcaagcgccctgagagactgatacaatttggatgtttgtcccctccaaggtgcatgtggactcccaatgttagaggtagggcctgctgggaagtgtttggatcatggggacagatccctcctaagtggcttggcatgctctccacagtaatgagtggtaatgagttcatgagagagctggttgtttaaaagagtgtggcacctccaccccctctatttggctccctctttcaccatgtgacaacctggctctcctttgccttctgccatgattggaagctttctgagatcctcaccagaagccaagcagatgccaacaccatgcttctcgtacatcctgtataaccatgagctaattaaacctctgttatttataaattacccagggtcagatattccttaatagcaacacaaatgagctaacacagagatattcagtttttctgatggcaagagccatttcctatattataacctgctaatccttattaacagaagagatgattcattgttcaaaaccagagtgaaccccagccaagtctccctttctgaagagggccctttgcttgggctctcctgcctcaattgcatcatttgctgcaggaacaaacacaaacaagctccttttctccttggagggcatctacaccaccctttcaatcattgtattattattattaaaatagtgtttattttctgttaagaagaaagtttattttaaatgtttgtagaaaatacaacctgtaatcttataaccctgagataaccacttataaaattttgcaatattttcattcaggcataggtactataattttatacacttttatgtcctactttcacttagcttggagagaatttttccacatcattaactatttctaaaaaacacaatttgtcctagttacacacagtgtcccatcctgtggctaaatcataatttattttctgtttgcccatttaaagtcactttgtttaccttgtattttctattctaaaaatgccgtgataaacatctatgttcatcttttgttcgtgtctttgatgattctgaatgactgattgctgataataaaactactagttaaaagattattttgaggtctttaatacatattgccaaatgaatgataagcttaattaaactttgcaaaacaatgtatgcatctgctgcggaggtagcaatatgccacaaatactaaaacaaaatagaaacaatccacaccataatctcccctgggggctgaaactatctacagccaaacagcttatagtccataaagcatgatttttcctatttgatactcttcattaacatgacatgactattccaggaaattcttgacccagaagattaagttggaaataactttgaaaattcattgactttccacatctcttcatcagagtaaatagcttccttcttagaaagatagattgttcagctggaatcatccaattgtttactctgaggtttgctccaaaatcctcacctgagttcaccagtcctgaactattatatcacaactttggcccagtcccagtcagacctcctcatagaaacacctgccttaaacgagacccctccaaatcacataaatatctcatctttatccttccttttcaaagacagtgctaaaaaggcagtggtcttccttattacaggaagcaatacacttggctttgcttgacccacaagctattttgtggtctccttggggtgttgcaggttcactgcccttccgcaattgtgaaacatggcagcttttgttgagctcttctgtgacccagggctttgtcttcattatagcattccatccctacaacagccctgttagttgagcactgttattcaaattgccaaatgttacatctttagaaagtggctttgtgaactctgccttagcatgtaatagctccaacaacttctatccttacaacacccaactagacacctcccaatttggtcaggggaggtctagtcctgcatcttcagtgccacccctatattatcacatggagtaggggtctacagcacctcaagacagtaggtgccaaactgggtgattttttccctttcttaaagtgcttattataaaattttctgtacataacaaaatagagaatagtaaacacgaatacattcatctccttgatttaactatttttaatatttttcacctataattcattttcacattgcattttacttcttacctatgcatttcttaaaaataaaataaagaccttttcctgtataacaataattattttcctttaagaaaatactctccctctggcaatgtggcaaatattttcatcaatttgtgctaggaagttgagcattgatttagactcctcatatacttttgttctttccacccaagtcccagttcacacctttgtacttatatacaaatccatttattttccatagtatagattctgtctccctaatgcatctgtgtctgcttacttcttgctccactcccaaaaccagagactgacaacttctcttggacagctgaaattatctcctagttgagcactctgttacactcagaccagataaggttcttaaaatacagtgctgactgaatatacccatctttttggaaacatttcagtagcagatttttttttaaccaaactagcagctcctgatgttatctctatcaactttctacaaaaatgtttattgagacactgcaggaaaaaaggaaaaaagaaacacacacacacacaacaactccccaaaagcagacacagagatactctattttttctgttctatctccctgtcctagaatctgggagcaacttctgcgcgttggtaaggttgaagacgcactcatgataaaccagtgaaggtgcagtttgatgggctcagaagaaaagagaaagctgcaccctctctcctcctctgccccaggcccccgacgcccacaccaacctgaaaaccatgcaaggaggccaaagtcctcctgccacaaatgtgcttagcaaaggctgtcatcaggaaagaaacacagcgagagagcagacgccaatggtgattctcttttagatgctccctggtctctcccttcacacgtggtagaaagaggaagagcctcagaatcagtaaacactggaggccgccattttcacattccccaaaaacataacagaaagcaaggttagaaatagtagtatgagtcaaagggaattcaaagtgtgagggaactttatagatgccaaatattacagtgaaaataggtatatctgttaatgaataggtaattttcaagaacatttatgcaaaaaatataaaaatcagtgtagaaagtaaagcaaacaaactgttggcagtatgaggcaaaactagcagaagtactattacgggagactttaacatcctcaaatataagataggcctccaatgaatgtaaggatatagataacttggtaatgtaattaacaggctaaatgtaaaaacttgccttcactacagttagagaagtacctcattttcaagtgaccacggaccttataaaacctaatctaccatatcacaaaaaaggcatcaataaattcttagtagcagaaattacactgatcacattttttgaccacattacaataagaatagaaaaataagaacagtaatttaaacacaagaacaaaaacttaataagcaggaaattaaaaatcaccttcctaaattaatatgggatcaaaggcaaactgaaatagaagccactttgcagagcggggccgggggtgggggggcggggttcaaaaaaacaaaaatgaagacaaaacttaccaaaatagtagtaaacaaatcttaaatgctttactattagaaagaaaaatttaatatcaattaagcaagtttcctgaaaactaacaggataaatagaaaaaataaaaatgagcagaactggaatgataatgaagccacaacaacagatttagaaaatattctttaaatcataagaaaatgctacatacaattccagttataatttgaaaattaaatagaaataggcaatttattggaaaaaaaaactatcaagttttttttaaagtggtagaacaccgaaatacaccaataatcatgagaaagacaataaattatcaaaaaagttttggggctttggaaccaggtagtttttaacaataaattctgtcaaatttcttaggagcgtatactctccatgaaaatatctatgtgcatatatatgtaagcccacacctctacacacacgattatactcacatcctgccttctatcctggaacaagacaaattgcttcctactttatttcataaaagttcccattctaacactggataaaagataacaccaagatgaaaactatggaacagacacagttacgaacatagatgcaaaatcctcattgaaacattaataaattaaattcaatagtatgtctttaaaaaaccacccactgcaaccgtttatttagtttagtattggaaaatctattaatcaaattaataggtaatattagctcaactgatggaaacaaaaagcacaagacaaacctcgactttttcttattttttcaaaaaagtgcgttgtaaatcaggaatgtaaggatactttcttaatgtgacaaagacatccactttaaaccagcagcgtgaacaaggagaggaagaccaacaggctagtgaccactactaccattcaatactctgcagaagttttaggcaaggcattggtagcatgatgaaaaggggatagaattatcattatgtctccttcaaaaacccaaggaataaactgaaaatctactgccagtaataagattattgaacaatgttgctgatagatagaaatttgaaaaaataactatttgaaaataatcttttaaaaatacataatggaataaaatagcaacaatagaacaaagcaggaaaaaaagcatagactacaacatgtaggattaacttaaacaagacacatgtaagaactatagaaaatatacaatcacaaaacctatgtcaaaaagaaaatgagcttcaataaatgaagaggcatactacattctgggaaaggaagagtgaatgatataaagatattaattctttgcacatgaatgtccctgtattatgaaattccaataaaaaaatcagcttaatttttcttctttggaaacatgatgaagtacttttaaagttaagctggcataaaaagccaagaataactaagggaattttattaaggaagaataataagaaaggccttctacaccagacatgaaatatgtttaacaaaatcttagtgattcaatcagatcatacgagttcaataattgacagaaggatcagtgcaaagagatgaaatgtgagtagaattagactctgatatatacaacaatgataagagtaacatagtgggtatggaaagggaatggaaggagtgggggaagaatacaatttcaaataggataataaggaagccctctccaggaagctaattttgagcaaagattttaaaaagatgaaggagttacccatccatatatcttgggacagagccttccaggagagaacagcaactgcaaagccactgaggtgggaaccagtctgacgtgttcaagagagatgaaggagaccaaatcttcctcttgctctagtaactgaggcagggaaatagtaggaaatgggaccagagacagactggggtgagctggggattggatcatatagtcttttacaccattatccagatttcactttttactccaagtgagatggtaagccattggaaggcacgggacagaggcatggcaggatctgatttccatttttaaatgatcactccagtttctttgttaaaaataggctgtaaagaaacaagactaaaattgggaagaccagtggaaggctattgcgaaaatccagccaagatatgatgaacaaagtagcagtgcagatggtatggaagattttgcagaaggtagagtcaacaggatttactgaaggtgtgaaagtgaggtatgagaaaaagagaagggtcaagagtgactcctaaatgtttgatctgagcacctgaaggatgtaagtttccattagctgagttgagatgacctcacaaaaagcggccttggaaagatcaggaatttaatttgggctatgacacatctagcatgctcatttagacatctaggtggaaatgttgagaaggttgttgtattaatatatactttagagttcaggggagagacacagactacgatcatagaccctgaagtcataatatacagattttatcaggagcagtgagtctggatggaagcggggtagaagtgagcatagagagaaaagtccatgggcagaggcctaggtcctgtcagcactagaggcaggattatgcagaggagaggagagaattgccagtgaggtaggaggttgtggtgatgaaactgttgctgcaagagacggttaagctgtgcaaataccgctgacagatcaaatcacatcaagaatgaaaactggccaatggagataataatggggaaggcattgatgacttgataagaggtgttttggtggagaggtgagatctaaaaactacaatgggttttaaaaaaagaggaaagaaattgaagtctgccagctaagactactaagagcattgctttaaagggaaacaaagaaatagggaagaagttggcactacaggcaaggttcaacatttggaaaacaaaattgaaataaatcttcacattagtacatatggcaaagaatattccagatggcctaaagagttacatgtaaaataataaaatattaaaacacttacagacaatataggtgaataactatctaatgttgggatggggatggataatctaagcacaacagaaaagaaaaaaatgtacacgtacaattcattggattgaaaaaatgccaggaaaccataaaataaaagtcatacatatttgaagaatacatgacacaaatatattatacaatactaccgtccaatgcatttagagaaaaatgctgaaacaccaagggaaagttcagcaaatatcacagacaagaagcaatgccactgcctaatgtgagaaacattcaaacacatttgtaaatgtagaagttacaatcacaatacaatcacaataaaatgaggtaaattttttaaccttcttaaaatattatcagaagttgtcaacctctaaaattagttcttatactcaatattggcaaagtttggttgagtgtgtgatcacagtgttaattaggtaaaatcttaccagaaagcagattggctttattagtaactttagaagttcatgggtttcgaacgttagtttcacttctaaaaattttcattaagaatatgatataaacacagaggcaaaaaagcatttatcaagtaccacatctgatgcttaaaattaacacaaactaagtatcttcattgcaaaataagaataataactatctcatgcagttcttaacattaaataaatatttataaagtatttagtatagtaccttgacatataattaaatgttatttatttaaaatcattcgctaaatcctagttaaacgtcattcgacaatcatttgttgagtaggtaaataaaatagtcacattgtgtcaattgagaaaagatgcaaaactatatgtattgtatgaatctcaatttatatatataattatctgtcttttgagagagacacagctatttgttttacaaaatattactattaagtcatttgagcctaactacttactacaataaataccatatgtattgtatgaatctcaatgttttttgtttgtttgtttgttttcgacgcggagttttgctcttgttgcccaggctggagggcaatagcgtgatctcagctcaccgcaacctccgcctcctgggttcaagagattctcctccatcagcctcctgagtagctgggattacaggcatgtgccaccatgcccagctaattttgtatttttagtagagacggggtttctccatgttggtcaggctggtctggaactctccacctcaggtgatccgccagcctcagcctcctaaagtgctgggattacaggtgtgaaccactgcgccccgccgaatctcaatttattttatatatatatataaaatatttatatataatatatataataaatatacatatatttgagagtcatacagtatatatggttttgcaacttacttttttcaaaagtatatatttcatttgacatatacaggtaaaaaattggaagaaaatatatcaaaatacgtacggttctctctggataagaggaatcgttattactactaagaaatcagttctcagagaaccaaatactgcatgttctcacttctaagcaggagctaaatattgagtacatacggacataaagaaggggacagtagacaccagggcctacttgaaggtgctttgtgacaggagggtgaggattgaaaaaccacctgcaaggtactatgctcattacctgaatgtaaaataatgtgaacaccaaaccaccgcaacacgcaatttacccacgtaacactctgaacctaaaataaaagttggaaaggaaaaaaagagaaatcagttcttagtctgtctttactcttaaggtcattctatttttgctgttctagagttttggtaaaatatgtctagatatgtattttactgtatctatttttttaaaaaaaacacacttttttagaaatggggacttactgtgttaatcggatcttactgcaggctggagtgcagtagtgtgatcaaagctcactgtggcctcaaacttctgggctcaagtgatcctcctgcctttgcctcccaagtagctgggattataggcacgagccaccatgcccagttttttgtatttattctgcttgtaatttgttgttctttctgaatctatgaattttgtgttaaatctggaaaattgtcttgccatgtcttttccctttcttcttctggaacttcaattaggcatatgttagacctacatgggagtctctttcagttgtctttgacattttccatttttttgtttctttattttacatccatggttctcaaactacaggtgaaggcatactgggaaaccagagtgaattcacaggaacactgtgggaatgttgcatttttgagagagacacagctgttcgttatataccatgcaaaatactaaaattaagttgtttgagcctaactacttaataaaagaaatgttgggaatttcttttgctttggggatactataaaaaaatcattcaggcactaacccatgaatggtgccatgaaccaaggaagtttatgaatctctattctagatttttggtatttattttctcaagattatcttccagtcatgaattctttccacagctggaactaatctgttttgtatccatctattgaaattttactctcaattattacgtttcatatttctacgaagttttatttggttacttaaaaatattactaggagaatggcgtgaacccgggaggcggagcttgcagtgagccgagatcccgccactgcactccagcctgggcgacagagcgagactccgtctcaaaaaaaaaaaaaaaaaaatattactgatggattttaatgttctcttaatcctaaattatattctgacagccatttttatttctttgcgcataattacacacatatattttatattctgcttttgaaaaattgccccagttgtagttttcaaagttccttttctacactatactatgagcactgacttttcttcatggtggtctgtttcctcatgtacgtgatgagctacatgttttacaaaattgtggaaatgttagcggtgcctgcgattaaagtgcattccttcagtgaggatttgccttgtttttaccaaggatttgaagtcttaccaacctatgtccaagcttacgacatgggagccacacaggagtcgtgaattaacactcatgggagagcagtcttccagttaaggatcccaagaagcctctcttgcccctccatccagagacatcttcaacccagccaggtagtcccactctctccttctgcaaggcacatcttcccccttaacccacttcagggttttgcctttagggtctgtggctccaggataaactctgtaatcttcccggccattttaccagctcccaggctttagctcatatccacacagaatccctcaaacttgcactctagggaatgaggcatcagaagccatcctagggcagaaccggcttcaccatagcttatctttctgaagtaatattgttttgttgctttgtgcttcttgaactttcccttgctttcttgccagatcactatgcattttaaaatactttaaatatatttttcatagtatttctaaacacactgggattatttctgtgtatgcctcatcttaccatatttccaaaaaaaggaaagcatttttttgtatttttacattgaggagaaattacctttatagttaggtgggattacactattcactttcctcatgaaagctccctgcctcctcactcacgtcttcgcttattctgtttcctctactcaaaatgtctatgatgtctatgtctgtgacatatttctaagtcttacctatcctcaaagtccggaaaagtgctgcctcctccctgtagtcttcctcaaactcccctgcagcttctgaagttaagtttacctgtatctttcctttgagtatttgtcactttctccctcatattgaatatatatcagaccttgctcatttgtgtatagaagttagcacttcaactatttacaaaggcttcaaatttcatcatggatattatattttaatttttgtgaggcccaaatttgaattcaatactccatggctgaagttcagaagtgacttctatagcttgtgagagcagctgggaaggcccagggcacccattaccaagtttatctgcttagctccatacacaggctaaaaaggtggtcaaactttggttcttccaatgggagggggaaaaagtttctagtaagaaaattggcttctactgttggtaatataaatgaagagaaaaataagtagatccaatcaagtgatggctttggccagaaaaaaaaaattatatatatgtatatatatatatatatatatatatacacacacatatatatatttaatatatattcaatataatatatattatttcatataatacatactttttaaaataacatttaaaagcaaagattcagattctgcagtagtgcagacatgaaaggtccaccatacattctgtacagaaactggaaaaagcaatttatgaagctattttagcaagttctctggatagtgcaaaaattgttcaagtgagagatagcctagcatagagtttatgttaatggccagatttattttaatagctttataaattacttgagttctgtatttatagaatcattaagggtccaaaggggtcacttatatttttcagttatattttattgcattttatgtagcaaattatatgctatagtaagattcatgaatatggggattgatgaaggtctcagggtatatcgcttgcaaatgtcaaggattttatgaatgtttattatgtcctgaaagataaaattcacgtctagcttaactttctccctgacttcacctaggagtgcttttcccatagtaggcccacatttgttgaaatgagtaggcatttcatttgttgaaagaagaaaaaaaagaaagctgttctcatctttatgttgcttttccacattttggcatttctcctggggtgagtttactcaggtattgtcagaggagataactgaggaatatagagtctttcttcagtttccatttgtggaattgtaacaaataaataacatcctcattcattattaataggctttctagagatcaaaaaagtggattccaatttccaatgaataattctactggcaattatttgcagtttaaataaaaggaaaggcattttatgtggacgatacaagcagtggataattaaaatacagtaactgatttccataaataatgaagatgggaaattatctctgacattatctctgactttgtttgcaaaactcaatttccaattcatgccccgtgaagaggattagccatttccactctagccccacctctctagaggggacaagagcacattacgcatattgcacagttttgctctggcaaaggtgtaagagggatctaatttcagctgctcacatttgaaaacaaagaactgagcctgtatagttcctttaaaaatttttaattaagagctataaataatgatttccaaaatacacatgtgcattctcaaacacacactccacgtgcaaccacaaacaaacatatacacaaaatgtagtcacaaaatactcaattgaggattgtgtagtagatgagttttaaaactagcaataaattgttcattctcaaatttaaaaaaaaatgctaacatacctactgcaatgagaacaacaacaaaatactattttgcttatattgtccctttcaaaaaaagaagaaaaataataacaaaaacctaggaactgtttgttacataaatgaatgcaaaaagactgttagttttggttcctccatttggtgtatttttgacttggcaaaatgaaagatggaatatagtgaggcaacgggtaaggaaccgggtggccatcttttgtgatcggtcccctcatcccaaggcttttatattgatagaattcccctattttgactttagtcaaaatccacatattgcatgagttaacagtttcactccgctcatctttcacttaaaattttctcaggatctggaggttctgggctgttaagctcacaaatgtgatctcagagtccagcatcccacattcaagtttccatattcacatttgtgagtgccaggacgtactatgtcctgtatcaaggactaactgtaaaaatgaaagagcatacaattagggaaatacgggtttagggcccagttccactgcttactagctgtgtgaccttgaatagttactaaaattgtcagtttcttcaagctgtaaagtgaggataataatagaaccgaactcgcatggttcttctgaggagcaagggtaatactttatgtgaaaacccccgcgtaactgcaaagacctaaacctttcggtccttaggactcaggggtatgatggaatgcttttctattttgattcatttatacacactcatggctacatttttgttcttgttttatgtcagatgggtaatgtgccgacgtcataaccagtttccagggtagcacatctcacacatccgcatgagcccagccatcacccttatgaaccacagaagcacctgcttcatttcttttcatctaagcctaatgattgtttaagtttttagcacatctatctaatttatacgacatcttatttctctgacaataaaccaacatttatttgttgttaactgatgatgttgcctaatgatcaggacccagattgtagtttgttatgtatcaggcaagccgaatgctgtcattagatagacacacagaagggtggagcttgttctgcctgccacagacggaagccattatcaataacctaataatatcaataggggctaagatgagatggcgggcagaagctatttcctccactttctctctgggcatcacctttttggctcttcctggggagtcaagatgtgctgcagtccacagtgtaaacgcttcagcatcatgtgcacttgggaaattgcaggtcctttcatggagaaatcccacagaagacaattagggtctggtacacatttccttcagagacctctcacacctcagccaaccgactcttcccttccgctttgaatgcaggataaccagaatggatcacttaatatttgctaagcacgccatgcacttcaaaacctctgcaaccccgctcacctctcccctctcaaccccgctcacctctcccctctcaaccccgctcacctctcccctctcaaccccgctcacctctcccctctcaaccccgctcacctctcccctctcattttaaaaatttccaaagagaaaataacagattacttacaataatacagagattaaatttacatcttattttttaacagcaaaactgaatgctaccagaaaatgatccgagatttttattttaaacctatactccacaccctggcaaacttgcattcaagtatgaggacaaaatgaagagttttgaacctgcaaagacttggaaattttgccatccataaatacttcagggaaaaaaatatatataaggaaaatcccataaaataaaaaacaaaaccaagtaaaaagatacaagaaagggtagtaatcaaataaaacactaaaagttatagtcaagtttaaataactgttgatgcttgatgttttaaaaatgtataaaataaccatctggaactaaaatcccagatgttctcaaccatggagtctgccagagagagcggtgagaagtgtaagaatactaaattttttattcttatgtaagaggaggatatagatgttatagctgtcgacagaattgttaaaattgttaaaaatataagtgtaaccactagaagaatataaatagacatataaatttcaaatcacaagggagggaatataatggaacaaaatataaaatcaattcagccacaggcaagatccaaacaaataatgaaaaaacaaacaaacaagcaaacaaaaccagtaaaattaaagtatatcagcaatcacagaaaaaagttcattttaaactctgaaaaataaaatgcagttacatgtggagtacaagagggctcctgaaattaaaagaaacagagggaataacaaaggatggaaaaatgaatgctaggtatgacacaataagaaatagatatttgatctttgcaccttattccccataatttctgataggagtgatgagtatgtctttggttttagtgaggtgactctttgagggccctaggtcacttcaggaggggggctgcttgccaggaagaccaaagcataattagccggttgcaactttaagccccatccctgacctctggggaggggaaaagagctggagatgaagttgatccccaacggtcaacgatttaatacatcaggcctatgtaatgaaaccttcatgaaagcccctaagtattaataggttcagagtgctcccaggttggtgaacacatcaaggggctgggaggggtgaacccggagagggcatggaggctccatgcccccacacaccacaccccatgccttgccctacgaatcccttccatttacttgttcctgagttctattctgtataatcagctgataataataagtaaagaaatttcctgaggtctgtgggcctttctaacaaattatggaacctgagaagagtcgcaggaaccctgatttgtggcaggttggtcagaagtatggtggaaacctgggacttgtgattggcacccgaagtggggcagtcttgtgggactgagcccttaacctgcaggtcctatgctagccccaggcagcgtcacaattgagttgaagcactggactccctgttggtgtccagagagtaaaagatgttttttttttttttttaaagccaacctcaagcaaagaaaaataaaaacaaacaaaccaaactccaccatgccacacctagatgagtttataggaaaaattccgtctgtttcagggaataggaaatgcttatgaggccaacctaactcttttttgtttttttgtttttctttgtttttgttttttttcttttttgagatggagtctcactctgtcgcccaggctggagtgcagtggctccatctctgctcactgcaagctccgcctcccaggttcacgtcattctcctgcctcagcctcccgagtggctgggactacaggtgcccgccaccatgcccggctaattttttgtatttttagtagagacggggtttcaccgttttagccaggatggtctcgatctcctgacttcgtgatccacccgccttggcctcccaaagtgctgggattgcaggtgtgagccaccgagcccggcccaacctaagtcttataataaaaccaaactaaaggagcacttttctttctctaagattcctaaataaaatatgagcaagtccaatccagctacgaattaaaagaatattatatcatgacaagcacatttaattcaggaataccaaaatggctgaatatccagaacgccattaatgtaactagatatgataatagattaaaagagaaatccaatataataatcttaataaaagttgaaaagcatttggtaaaatttaatgactattcctgagtaaaccaacaaactttttagccagctagaaacagatggaaagtctttaattttataaaagctttaagcagaaaccaggccgggcatagtggctcacacctgtaatctcagcactttgggaggccaaggcaggtggattacctgaggtcaggagtttgagaccagcctgactaactaatggcgaaaccccatctctagtttaaaaatacaaaaattaaccaggcatggtggtgcatgcctgtaatcccagctacttgggaggctgaggcaggagaattgcttgaacccaggaggcataggttgcggtgagccaagatcgcgccattgcactccagcctgggcaacgagagcaaaactccatctcaaaaaaaaaaaaaaagaaagaaagaaatgattattatcaacatttggctgggtgtggtggctcacgcctgtaatcccagcactttgggaggccgaggtgggtggatcaactgaggtcaagagttcaagaccagactgaccaacatggtgaaaccccgtctctactaaaaatgcaaaaattagctgggcatggtggcaggtgcctgtaatcccagctaactgggaagctgaggcaggagaatctcttgaacccaggaggcagaggttgcaatgagccaagacctcaccatggcactccagcctggcaacaagaacgaaactccctctcagggaaaaaaaaaaaaaaacagaaacctacagcaattatatatatatatatatatctgtgtgtgtgtgtgtgtgtgagtgtgtatgtgtatatatatatatataaatcatatatatatatgatttctattagagcttggagcaagaaaaaacaaaagaccactttccatattacactacaggcttagccaataaaaatgtcaaagtaaatatataaataatataaacatcacaaagaaacaggaaattgtcataattctctgcagtatgattgcctacatctaaaagaatttgagggttttacagataaattattagaataagacactattaaaataagaaagctctgtaaggagacagacacatcctcatgtataaaaatcaattattatcttatatgttagcacaaattataaactagaatttgtaattaaaaataaatccaggtctatgcctctctttctgttacacacagacagtaaagtgcatttggagaaggaaaaaaagcccaagaatgacatgaaaattttgaaaaagaaaaaaatggtaggtaatttctctatcattttattatcacatgaaaaaaaagcctattgtaataaaaacaattggactattgacacaaaaaggaaatacatggaaccgaatttgagaattaagaaacagatccatgaattcatgggcatttatttttgttaaggtataggatataacttcaagtaaatatggacaggatatactatttatatgactgtttcatagaaaactaaactacatagatcttctatctcacactacatgcaaaccatacattttataatttcaaaaggattagagagctaaatatttaataataaataaacaaccctttatgattattgttgtgtttttgtttgtttgttttaaaagtcttgtttggggaagtttcctaagtagactttgaaagaataagtcatagtggagaaagtggacagatttgatgaaagaagaattataaacttccttaacttaaaaataaaaatgtatatgcaacattaaaaaacacgcaagtatctttgaaagatattttcaacatacaaataagacaaaagttctatatcatatatatgtgtataaagaacttccaaattatttttttaattgttaaagaactcagcagaacagaaattatgttaaaaggtaattcaaatacaaatttcaggtggtcaataaatacataaaaatgtatgtagctctactaaaattaataaaatgctaataataataatacctaatgtttattgagtgcttgctactggccagccactgttttagggttcacttgtgctaattttgaagccttacaaccaagccttatagtgagtagttttcctactgcaaagaaaggagacgttgcctagagaaccaaaataacttgcccacagatactcagctagttgcagtggagcttgggtttaaactgaatttgactaggtcctaaaccagttcactaccctgccatgcttttattgtttttgttttttcagtcatcaaattggcacaaatcttttaaaaaggtcaataataattcagtgttagtaagggtgagacaaactttttattctcaaatattcttggtggcattataaattgatagtctttttagtgcaatatggtggcctctttaaaaacagtttaaagcatactacttgacccaagaattccacttccaggaaaataaccattaagaaatagttaacatatgcaaagacatttacaaaagaatgcttatggcaccattatttgcaagagtggaatctcagaatcaacatacatgtcagtaaataggcttccagtgaaacaatttggggaaaatccatgcaataaaacagcattcaatctttaataaaaaggaagtaggtccattcttactaaactaatatgaactgatatggaacagttgcaaaacatagtgacctactgttccctgaaaaacgattgcaaaagcaaacatatttaaacgtgtgtgtgtgtgtgtgtgtgtgtgtgtgtgtgtgtgtgtcttttttgagggaagaaggtaagaagaaagaagaaaaaagcttatgagtttatgtgtaatcatttagaagagactaggaagacacacagcaaactgttttcactattaccaatgggtcttgcttgacagagaaatagaagtgcgtttggttggaaagcagagaatgggaaaatatggacttaaacatgatacttaatagcaatagctattctttgaatctttttcaagaagatattcatgtaatatttgtgaaatgaaaacaataataataaaagaaagatacaaaataaaagtgatgaaatgaaaaactgaacccacagaaaacgcagacaatctaaacaagaacatcagacagcacattattgtaatagttgcataccatcacagcaattcagggtcatggcagggatacccatctgggaaataaacgtgatcaaccactctaaagattcagggtgcttgaaagagccccaaccaatcttttataggaaagcttcacagcacctttctgttttaggaaagtgctaggttccacattgggtgtttttatgtatcatgccaagtcatttcactgagatctgctggcgattcagcctggagctttcagattccttctcattttaccaacatcaagctgcctccttaacacaaggctgatcctgaagtgattccaccaacagatgcagagatggctttggcagaaataactgtaggctcctattctctcttccttgttgaaacatgcgcagcattgctcattaatcagactcacaacacttcatcctggctggaaataataggccccattgtacattagtaaccaggttacttcaccccttcattgctgcagttaacacctattatttcctccaggcactaatattttgaaacgggatcatttagctctgaagtatgttaagcgttgtgtgtgcagcacttcttttgtcagaaggaagaattcaaggtggctgagcctctgtcctagctattgagctacctgtaaaaaagtcagtattgacatccacagcacacaccctgtgtttagaaacagggctttagggactggataccttggctgactcctgtaatcccagaacattgggaggcaaaggtgggagagtcacttgaggccaggagttcaagaccaatctgggcaacatagactctctgtctccaaacacacaaaaaaactaaatagaaagggagccttgggtgtcttattaatatgctgttactgagcagcatgcctgagactcggaagatcagaaggattacagcactgagatactggctttcccctctatttgcactggaaacctctgagaacaggggagacacggccttttctaaatgcttctccatgtctcaagtagaagcagcagcgaggagtggaaaagcaggctgcagccttcttcctgctagctctaaacatgtttaagcagaggaggacgtagagaatgaactgcttaatggccttagagagagaaacaaggtagtagtcatttggtgacatagaaaaaaagagttagtttcttactctcaacaagcttaaagctatcagagtataattttcaaaaccttaaacatgtctcttatacaaatattaagtgagcacatatcaaagatatatttaacttattaatgaaagaatcaaaagaagagtaaagctagttcaaagatgatttgagagactgagttagttatatatataggtctgaaaaaatgttagaagaagattgctaaatcaaatataaaactggttaatgtcccacagaacaaaaaaataatttctagggttatcttttcttgctttggacaagaaaaatttatgttggtattagtcatataaaagttgatatttatacttacagggtaacaaaatatcgtaatcaataataaatactaagtcaaacaattgcatccctagagaaatagattaacttcaaattgcctaataacatttcatcatgatattgaaaaaccatgtcattttcctttttcttttttctaactttgagttttttgttttttggttttttttgcatgcagctgtatccatggtgatcctggatggtggatggagaccaccataccccatctacacaatttcaggtatgaaaggtcaccaagagaccacacaccatatccatggtgatcctggatggtggatggagaccaccataccccatctacacaatttcaggtatgaaaagtcaccaagagaccacagaccatatccatggtgatcctggatggtggatggagaccaccacaccccatctacacaatttcaggtatgaaagatcaccaagagaccacagaccatatccatggtgatcctggatggtggatggagaccaccacaccccatctacacaatttcaggtatgaaaggtcaccaagagaccacagaccatatccatggtgatcctggatggtggatggagaccaccataacccatctacacaatttcaggtatgaaaggtcaccaagagaccacagaccaatttcctctctccacatgggtttgggttaaatgacaagaagtcaattttctgtaaaggggctgttgacatgagcttatgccatgccataagcttaaactcaggcagacctgctctctgccactttttggctaaacataatcccagaccaattttctcttctgtgagtagaagtaataatggcacctgcctcatcaactggagtggggagtaaaggagatcacccaggcaacgtgtttcctggactgtctagcatttacccaacagttagcaaatgctgctgctgttgttgctgtttccacaccttgcaactaagttctatcatcacttttcatctggagaatgtggtaaaatttaacttcagttggatccaacttaggaaaaggagagaaactcacaaaataacaaaataaattgcagaaaatgtaatttcccccttggctaagaaagttgtccttgaactggctttctatgcactccagagtacattttaagcaaagattggctcaaggattatagccttactattcctctgaggagaaaaggaaaagtgagaaacaagcagggatttaaatgcaatgttggtggaagatataaagttgattgggaggatgagaagatggggctgagaaggaagggggggctgccaagactgtttaaaaagtcagatgtgactgtctcttagcaatgtgtctgtgatttgcatgatctaaaagggggtcaaaaatatctgttccgcctacctccctgggataggataaagattaaagaaatagagcaaaactttagaagtatgttctgctcattctgctaataagattctcatctttttattctgcttactgggtctgtaggaggccaggaagctcagacaatgtcactctgaactacacagtggttatgagatttaagcatctctctgacaagaacagaactcccaatctccctttagcctttttgtaatcagttttttagttgaaatagcaatggatacaggtgatatcctttgtagtttgcatccgtgttttctgttggacaaaagttagatatttgcagggttttaaaaaattcccttactatatatttttgaataatcatgatgaggtataacttacataccataaacccgcccactataatataactagtttattttattttattctttttagagtcagggtcttgctctgctgcctgggctgtagtgtggtggtgtagtcatagctcgttgcaatttccaactcctgggctcaagggatcctcccaccttggcctcccgagttgctgggactataggcgtgcaccaccatgcccagctgctaatgatctttagtaaatttatagagttgtgcaactatcaccacaattcagttttagaaccctttccaacatctaaaaatgattcctcattcttatttgttgttactctccattttcatcctgcagtcccaggcaaccataagctactttttctctatagatttgccttttctggacatttcataaaaatagaatcacacaacattttgtcatttgtgtctggcttttttatacagcataagtttttcaagattcattcatgctgaagcatgtttcagtagtttctttctattgttgaatagtacattgcatagattactacattttctttattcattcaccagatgatgaacgtttgcactgttcccaattattttgtatgagtaattttgctatgaacttttgcatacaagtctctttgcagacatatcttttcatttatcttagatagatacctaggagtagaatttctgtgccatatattaagtttatgttttcattaaagtgtttattaaactgccaaactcatttttaaagtatccataccattttgcattctcactagcaatgtatgagagttccaggctccccatatccttgtcagctcttgttattgtctgtctttttttcttcaattgaaaaggcatctcattgtggttttaatctgcatttccctaataaataataatgttaagcatctttacatgtgcttcttagccattcaaatatgttctttgaagagatacctatttaaatcccttggtcttctgtttttaataaatttaacttttattttagattcaagcagtacatgcacaggcttgttgcctggtatattgtgtgatgctgaggtttgaggtatgaatgatccatcacccaggtactgatcacagtacccaatagttcattttcagccctggcctccttctctcccttctcccccaatgacttcccattgtctattgttgccatttttatgtccatgagtacctaatatttagctcccacttataagtgagaacatgcagtatttaactttctgttcctgcactgattcacttaggttaatggcctccagctgcatccatgttgctgcaaagaacattatttcattctttttcatagctgcatagtattccatggagtatatataccacattttatttatccagtccaccactgaggggctcttaggttgacttcatgtctttgctattgtgaacagtacagtgatgaacatacaatgcaagtattttttggtagaatggaaatcctttgcttatttttaagttgagttctttgtcttattgttgagttataagtatttttatatattctatgtataagtgttttattagctatgtaagttttaaatgttggctttcagcctgtggctatcttttcattttcttaatggtgtctttagaagcctgaaagttctaaattttgaaaaagtccaatgtattattttttcctttgtgaatcatgcttttggtatcatttctaagaactctttgcataacccaagatcacaaagattttcttttatgttgtattctagaagttttatagttttaacttgcatttaaatctacaatctatttctaattgttttttatgtatgatataagacagtggtcaaaattaatcattttgcatgtggatattcagttgtcccattatcatttgctgaaaagattatcctttacccattaaattgccttggtacctttgtcaaaactcagttgaccataaataacacgttgggcattttttccccgaacattcaattctattccatgagctacatgtctaaccttgtcccggtaccaccctttatttattcctgtagaaatgtctagtgttttttgtttttttgtttttgagacagagtctcactctgtcacccaggctggagtgcaaaggcgcgatctcgactcaccgcaacctccacctcccgggttcaggcgatactcctgcctcagtctcctgagtagctggggttacaggtgcctgccaccatgcccagctaattattatatttttagtagagatggggtttcaccatgttggccaggctggtcttgaactccagacctcaggtgatcgcccgcctcagcgtcccgaagtgctgggattacaggcatgagccacctcacccagtccagaaatgtctagcatttttaaacccaagtcttggatatcatcatctagagatccaggaatacagaaaggaaagtttgtaacatatattttgtatacacaattcacaagatcaacatgatcacaatgaatattgtggtttatctctactgccaaatttgtaatctattaacacatacagacaaataataacacataataacaaaagccacctgggagcctataaatatggtgagttttctaaattaaaactacaagtgtggataattaacaagtattagtttattattatgcacaatccatgtttagtcttcacatgttcatgattattttggtttcctatctgtaaaaaatatccctgtcctctttgctaaaagaacttccctttgttcaggtgttgagaaatgacatgatcatagaagatgtacctctctgtagcactaggagctgaaccactattactctggaccaaagatcaacaagcttttttctgcaaaaggacagagagtaaatattttaagttttgctggacataaagtctctgtaacaactactcagctttaccattgtcttggaaagcagctaaaggcaatgtgtaaatgaatgggtgtggctgtgttttaataaaaccggatttatatgaagaggtaacagcaggctttgactggtgggccttagtttgccaaactctggtatagtgtagtttcttagggttgctgtgaccaatcaccacagattaggaggcttaataggacaaacatttgttcccttacatttctggcctccagaagtctgaaatcaaggttccaaaggctccagagaattgttctttgcctccctcaggttctggtggctcctgacattccttcgcttgtagcggcatcactccagtctctatcttcatcttcacatggcttcctctctgtgtcctcccctcatcctatgagaacacttgtcattggaaatggggttcactgtaaatcctagatgattttatatcaagatccttaattaattacatgtgcagagtcgctatttctaaataatgtctcacattctgaggctccaggtaaacatgcattttgtcggggggccacaattcaaccactattcaacacctggtttaggctaatcatggtaatcccattcttctttgtcatgaattgttttgtagaaagcatgggacccacttctagccagtgaggctataaaggctgtttatggggaaatctgggaaaatgtcttcttatttgatgaaaaataggcacaggcacatatcttacactttcctgcctctgggcgttgtcttatgctaagagttgatgcagttaccttgtgaccataagaacaaaagccagaagaattgctgagaagctcatacaaagtcttcacatcactgcgatagtcaattaaccaactttgccgcttccttactctggacatagagtgatgagagataataaacatctattgattaagttctttaatttaggtttacttttaggtatagtcaaaatcatcctgactgttctcagagtagttattctcaggtattctccaaatactacaaccagatgctagagtgactgaaaagcttgttgatcttcctgccagcaatcaatgacacatcggtacaaatccatttttttttttaagatttctcactttgacattgactcactgggcaaaaaagctgtaatcaacctttctaatttaattctgggatataatatggagactgggcaggaaaactcttggaatactcagtgagaatatcaacacatctctgagaaaaatgggactgtctaaaataaatagaaaaacaaaatggaatttaaaaaaaaacaagcgagtgagagagagaaagagatgctctgctaactctgaagactagcctgggtaggtcacaatccttgtgtaccctgtgacttccacaaggaaaaggaaacagagaacacaacgtgaaggaaaagtgaagacagtataggcaaagaaaagaggtggtggtcctattggagtgacagttattgtcctggatagctcaatgtgatattgtgaggttccacagacagtggcaaaaaacattcagatcaaaggtctggtatgccagcactcatcacaaaatgaattattgaatagacagtgtacattctgaaaagtatgtaatatcaatatgttgttctctatacttaatgtatacataaagtatatgcattaaacataccatatatatgtatatgcaatctatgtaatcaacacatatgttatataacattttctcccatttttatattgagtgtttattttatgtctctaacgggggaaaagggagactagaactcaaaaatagttgtaaaaatttcctcctgagagaaatccatgtttaaaaatctgctttctattttggcaatgaaggagtagcttctaacagaacaatctttgcacagataataactataaaatctggatacacacaacaaaattaaaggagagaaaaaccactacctgaaggtactgcaaacaaacaaaagcagggaaatgctgaggaaaatttacacttagaagaaggaaatgggatgatgctgggtaagttttcaatatttcatggacttttgcctgaaggcagccccaatgagcatgaagtggaattactaaaactcagtagatatcctgcagtctcactggcttgtggaaacagaggacagagtttgaagtgaccacggcagctataaaatgaggaaagaggtgccagaaaaaagatatacacaaagggaaagccctaaattctgtatttaaagattggtttaggctgagcgtggtggctcatgcctgtaatccagcgctttgggaggccgaggggagcagatcacctgaggtcaggagtttgacaccagcctggccaaagtggtgaaaccctgtctctactaaaaatacaaaaattcgctgggtgtggtggcgggtgcctgtaatctcagctacttggaggctgaggcaggagaattgcttgaacccgggaggtggaggttgcagtgagctgagaccacaccattgcagcccagcctgggcaacaagagcaaaactccaactagaaaaaaaaaatcggtttaaatatctggctgatctctgaatgcctcctctgcagggaagactacaagcaaaccagctaaggccaaaaggactccacaatgattcctactgctgcccaccacagagaacacagaggttggactttgattattgccacattaactgtctgctaaaaccaaagaacaaaaatcaatacattcagaagagcataacagaatccaaagttttgtaccaatgtccagaatataatcaaaattactagactaccaagaaacaggaaaatgtgacccataatcaagagaaaaggtaatcaatgaagaccaaccccaagacaactcagatgatggaatcagtagacaagtattttaatagtagttattataactatgctcaagaatagaaagggaaatacatgaataaccagaaaatctcaacagagaaactttaaaatctattaaaatgcacaaacagtggtagcattttaataattcattttgtcttttaaaataattcattttatatcttttaaaaatagttcttttaagaactatttttttcttaattaaaaatatcatataaaattggtcacttcagtgctattatcttggagttcaattagtttatatagtatgatagcagatagtctggtaaagtggagagagtattacacatttagacaaacaaaaacaggccaggtgcagtggctcacacttgtagttccagcactttgggggccgaagtaggaggattgcttgagcccaggagttcaagaccagcctgggcaacatagtgagacccttatctcatattttatttaatttaaataaaagtaaattaaaaagacaaagacaaatctcaattctactacaaacatctctacatgacattgagtgagacatttaaccacagtggaccttgatgtgttcttctgtcaaatgtgaggctggatctaaatcagctccaaggcttttgctaaaaatctaggggaaatttgcttagcatcccaaaattagtttgtataaaagttaagactaacttatgggtctgctactcatgaccaaaacctcaacctcaaccaaaagtagccaggaaatcttaaccaaatgtatactatcttcagcaacttgtctgtagattaatgaaacatagtttcaggtccagatccctgtttacttacccaaaactttttactgtgccacatacaaaggctcagagacacatcgaactggatgctctagttgaaagtaaacagaaatatcactttctccctgtctagatttagcagaattgcatttggaaatcaaaacaattcatattacaccagatttcagcaatgtttgaagcatcaaaaataaattaaataaaataaatcttctcccatgaagcctatcaaaaataaagtaggtggtaactgaattgaaaacttaatcagaatgaggttctgttctaaataaatacgtgcattttaaaaacccatttatctaatgtactataatcatagaaaagggactttcaaacttttgattggatgctagaatgttaaactctgacggaagaaataaaagcatttgtaatttattgctttgcttttctttttcatagggtacaatttatttatttaattttcctacaaggatatcttatttctcctctgacaaatgccaaaaatgaagacaagccaaacatatagattgcattaaaattgatgtgtattttaaaatttcactgtttttaatttccctgtgctgagctgtcagccctggctacccttgggaaatctgtggctggtgctcagtgcaccagtttcctaaacacagctcagccacaacctcttactttattccagggttccactcaccaaccttgaatcctcaaaatgtttttctgatgactctatcctcacgtggcacaagctttgccacagataagggtcttatatgtccacaaataacatggggatgtatcttacagatggagaagaaagaatagcaaaataaatatgaatgtttgcggacagagcctacatatgaactcaaacacatggatgtctaaagttatgatattaatgagatatttgaaggtagataaaaggaaatgcatccccacagaaatctggtggaaaaaatagaatttctgtctgctgtagtttcacacaagaacctaatcttgggtttggaagggacgttagaggccatctgatccaactgcattcccgaaacaggaatcctgatagtcggcgattctccttagaattgcaggaattcatatcagaaggaccaaattaagtctcatttgtttctagggtcatgatagttctgtggaaatcaagtttcatttttgttttgaaccaaattgtctgagagttctgaaatctgagttctaaaaattcatataaacctattggttgatactatgtctcagatctgaattactaaaaatgtagtgttaaccagatgataggtccagcaataggaggatattaaagaccagtctgtcactattctttgctgctgtttgtgagacttctttctgccctgaaggggttcaaagccatagattagcaacaaaataaacacaggcatgatctatagtttttccccccgtccgaagtgcttagaatattggaaaataggatcaatatttattgagcattgattctgtgctgtaaaagggtgaagagttttggaactatgtagctggaagaatagaagactgggatagaattcaagtattttctgatctatgcaatttgtcttaaataagatgctgatcaaccattattaataattccagagaatagaataaaagaaaaacagagtctagaaaggggaaataagcaaattattagtattctgactataaatatcataaaagagtttttgagggaagctatatcacgatgtctttggaggactttaagaataaggtcaaacattcatttatctttactgggctgagaaaaatgcatcatgatggaaaggatgtatcacttatcaacatttcctttcttgatactataaaaaaggacagagtggtccagagttggataaaaagaaagactggcctttaagagtccccagtttttctcatcacttatttagagagagaaggaaaacaagtatgtgggattcaccttttttttcccatctggattattgattttcacctttggaagtttgtcccactaactaacaatatgtttttctatggcttagcttacacaaccctaaacccaaagctcattaatcgaagctccaagttcattgtcttgcatccttcaccaacccgaaaatcactcttctcccacaaagagttgaggaaagttaactactgatttttcatagatttaaaacaatgcagttcttaaaacaccatgtctcaaattgctaccagactaccctggacatgcaattagtcttcttagaacagaaaacaccaaaaatagttagtgttaattcttttattctttatttaaacctagccttctagtttttataagctccatttttaattttatgattcccacatattctacttctgagttacatactagaggcagtttgggggttctttttgcatctaatgaatgttctcagttagaaaaatcaaaccctaccaaagattttaagtagccatgtgcatagtgcaatttaaggggtgtcacaaaccccatctcctctctgcgcagtcatttaaaacaattctccagtttgttcccagtgctgcttgtccttcttattaccctcaggaaaaagttgagaatgtgcacataattagaaaacatcataatatcaatgccttccttttgccaggtactatgtaaaagtgctgaacagcagtaaagtcagcaaggcggcaggctaggaaggtctacacccttgtttccccactgaaacattaaataaaatatctgcagatatactaaaatgactttatatgagctctgaaaactagtcaaagatctgcagccaccaagtgaattcccactgaaaaaaagccacagtcaaacggtgggaaattttgtggtgtttttactcaccccacctcaccccttccactgtggtgtagttgggagaaaatgtcctaattcctagtttcctccctggagctaggaggagaagagcacaacatactcgcaatgttctaacttgtctgtgggctttccacaggatggtttgctgtcgtgtctgacttggagctcagacagaaaatgaaaacattgtttgtaactcaggctggtggaaaacatggaaggcagtggcaggtactgtggtgtgtaaaatgttaagggggactatagacccatagacatttgggggcaaatgatttttaacagagaaatctgataaagcatctaatttgccaaggagaacctggggtgagactctctggcaaattaggacattttaaagcagctatttttgtggagagggaagattttatttttaaatctcacacaggtccaaccacgaaatatgcctttaaaagacctcagaatatcttaagcctcacttcaggctgatcccgaggctgaaaggccccctgattagtgaagctcctccatgtcaacctgccaagattggaaaggttgatgtgttttcaatgcccaattttcaataaacaatcacaagacataaaaaaaaaatggcaaaatatggcaaaataaaaggaacaaaataatttcctggcccaataaaaggaacaaaataatttccagaaatcatccctgaagaaaaataggtatcagactgtccaggaaaagacttcttaaacaattgtcttaaatatgctcaaaaagctacaggaaaatgtggacaaagaactaaaggaaattgagaaaaagatatatgaacaaaataataatatcaacaaagagacaaaaattatactttaaaacaaacaaatagaaattctgcagcgtggctgtcccaatcagaccaaaaaaaaaaaaaaattcactgaacttcaagacaggtgatttgaaatcatcaactctgaagagcaaaaggaaaaactattaaaaaattaactcttgctgcatcaagtggacaaaatatatactatcagagtcccaggaggaggaaagagagaaaagggcagtgaggttatttgaagaaataatggacaaaagcttcacaaatgtgaagataaatacggacacgcaaatacaagaagtctaagtaggattaaccaacccaaagagaccaaccccaagacacattattatcaacctgttgacacagacaaagagaatcttgaacagagcaaaaggaaagtgacgtgtcatgtacaagtgatccaggacagactataagtggatttctcagcaaaaaaacttacaggccagagaaaattagatgatatatttaagatgctaaacgttttcttaaagcatcagtcaagaatctaggttgggtacagtggcttatcaccgtaattctagcactttgggagcccaaggcagaagatcacataagcccaggagttcaagactagcctgggcagcatagtgagactccatctctgcaaaaaataaaaaatttaaaaatcaactgggcatggtggtgcacgcctgtagtcccaactacttgggaggctgaggagggaggatcacttgagcctgggaggtcaaggctgcagtgagcagtcatcatgccactacattccagtatgggcaacagaatgagaccatatatctatggcctctttttatttttttatgtttttatgttttttaatgttatatttgtcttaaagcatatatatgctttaagacaccatatatatatatggtctcactctgtatttcatatatgtataattttatatggtctcactctgtattataattctctacatagcaaaactgttattcaaaaatgggaaacaaattatgacattcacagataactaagagcggacgtagttcattaccaatagacttgttccagaagaaatgctaacgagtatcctttaagttgaaagaaacaacactcaaaactctgtcaaaatacaaagttcttagccaggtctggtggctcacgcctataatcccaacactttgggaggcctaggcaggtgggtcatgaggtcaggagttcgagaccagcctggccaacatggtgaaaccctgtctctactaaaagtacaaaaaattagctgggcatggtgacatgcacctgcaatccgagctacttgggaagctgaggcagtagaatcgcttgaacccaggaggcagaggttgcagtgagccaagatcgtaccattgcactccagcctgggcaacagagcaagactccatcttgagaaaaaatatatatatacatatacatatatgtgtatatatacacatatatacacgtgtgtgtatatatacacatatatacacgtgtgtgtatatatacacatatatatacacgtgtgtgtatatatacacacatatatacacgtgtgtgtatatatatacacatatatacacgtgtgtgtatatatatacacatatatacacgtgtgtgtatatatatacacatatatacacgtgtgtgtatatatatacacatatatacacgtgtgtgtatatatatacacatatatacacgtgtgtgtatatatatacacatatatacacgtgtgtgtatatacacatatatacacgtgtgtgtgtatatacacatatatacactgtgtgtgtatacacatatatacacgtgtgtgtgtatacacatatatacacgtgtgtgtacacatatatacacgtgtgtgtgtgtatacacatatatacacgtgtgtgtgtatatacacatagatgcacgtgtgtgtgtatatatacacatagatgcacgtgtgtgtgtatatatacacatagatgcacgtgtgtgtatatatacacatagatgcacgtgtgtgtatatatacacatagatgcacgtgtgtgtatatacacatagatgcacgtgtgtgtgtatatacacatagatgcacgtgtgtgtgtatatacacatagatgcacgtgtgtgtgtatatatacacacacatacacacacatgtgtgtgtatatatatacacatatatatatataaagttctccagtaaacataaatacattaacagaaattttggcctgtaactccacttttaattgttatgtactaggtaaaagccaaaagcaaaaagaattataagtctatgttaatgggaacataatgtataaagatgtaatttgtgaccttggcaacataaagtgtttggggaggaggagctgtaaagaagcagagtttttgtatgtgactaaagttacattggcatcaatttaacaaagattgtcataactttagaatgttatatataatccccatagtaaccacaaagaaaatatttatagaatatacacaaaaggaaatgagaagaaattcaaaatatgttactataaaaaatcaagtaaacaaaatggaaaacagtcatgcaaaaaatgagggacacaaaaggctctaagacatacagcaaaaaacaacaaaatgtcaaaaagtgtccttattagtagttactttatgtaagtggcttaaactctccaatcaaaagacatggattgacagaatggattgaaagaaagaatccaagcatatcctatatataagagactcacattagatttaatatcatctataagttgaaagtgaaaatatgggaaaaggtattctatgcaaatagtaaccaaaacaaaagtgaccagagcaaaaacggccaactaatattagacaaagtaatctttaagtcaaaaactgttacaagagacaaagaatgattattatataatgataaaagggttaatttgccaacaactataagcatatatgcatcaaacatcagagctcccaactataagatgtaaacatgaaagaattggaaggagaaatagataactctaaaatagtaggaaactttaatacttcactttcagtaatggatagaacaaccagacagaagatcaaatacgaatacagagaaattgagcaacattataaccaactggacctgacacacatatacttaacacttcacccagcaacaacagaatatacattttctccagtgcacttggtgcactcttcatgataactcatgcattaggcaacagaaaaagtcttaatacattgtaaaagaattgacataatacaaattgtctgttcttatcacaatggaatgacgagaaattaacaacagaaggaaaactggaaaacacacaaatatattgaagttcatcaacatacctttaaacaaccaaaaaagaaatcacaaggaaaattataaaatatcttgagaaaaacaaaaataaatcatgacatacctgtcataccaaaacttatgagatgtaggaaaagcagagctaagaggaaaatttatggctgtaaaagctcacatttattaagacaaaaggtctcaaatcaatagcctaactttatatttttggaaactaaggaaaaaagagtaagtccaaaactagcagaaggaatgaattaataaagattaaagacaaatacaaatttttaaaaagacaatagagaaaatcagtaaaataaagagttggtttttaaaaaacattagcaacattgacaaacttttagctaggttgactaaaaaggagcaagaagacaaaaaaatcagcatggaatattattgtcaatttgacagaaatagaaaagattataaggagtactataaacgattgtacactaagaaattggattaccaaatgaaatgaacaaattcctagaaacacacaccttaccaggactgaatcacgaagaaataaaaaatttgaatagacctataactaataaggagattgaattggtaatcaaaaaactcacgacaaataaaaaactaggaacagatgttttcactggtgaattacatcaaacacttaacgaattaacaccttaaaccgttccaaaaaattgaagaggaaggaatgcttcctaattctctagaaaatactagcaaataggattcaacagcatattaaaagggttatacactgtgacaaaatgagatttattccttaaatgcaaaggtggttttatacattgagaagaaagtcagtcaatctaataaatcacaattcatggaatgaaggagggaaaaaaacacatgatcatttcatttgagtcagaaaaagcatttgacaaaatttagcattatttcatgatgaaaacactcaacaaactagaaaaaaatctaactcagtaagagccatctatgagaaacccacagctaaaattatacgtaatggtgaaaaactgaacttctttttttaggctcaataacaagacaaggattcctactttcaccacttgtgttcaaaatagtactagaagtacaagccagagcaattagagaagaaaaagaaataagtcaccgaaattctaatggaagaagtaaaattatctttggttgtcgatgacaccatcttataggtaaaaaactctaaatgtcacacatatgcacccacacacaaaacactgttagaattaataaatcaattcagcaaagtcgcaacatacaaaatcaacatgcaaaaattggtggttgctgttctatatactaatagtgaacaattcaaaaaggaaattaaagaacaattccacttgcaatagcatcaaaaacataaaatacttaagaataaacttaactattaaagacaatggagaaaatcagtaaaaccaagagtaaaattagtaaaaccaaggaagcaaaaaacttatacagtgaaaactacaaaatcttcctgaaaaattttaagaaaatagaaataaatggaaagacaacccatgttcatggattgaaagctttaaacttgtcaacactacccagagcagtctaaagattcagtacaatctctaccataacccagtgatatttttgtaagaatcgaaaaatttattctaaaagtcatatgaaaactcaagaaaccccaatagtcaatataataatgataaagaaaaacaaaggtgtaggtctcacatttcctgatatcaaaacttactataaagctttggtagcctaaactgtggaataggcataatgacagacgtttaaaccaacggagtagaacaaagagccaagaaacaaaccataaaatatattgtcaaataattttaaacaagagtgtcatgaccatttaatgaagaaaatatagtcttttcaataaaaagtttgagaaaactagatattcatatgcaaaatatgaaattcaacccttaatttagcccatatacaaaaatgaactctcccagattcagtaatggctgcaaaaaataaaataaattataaattattaaaaggtaatcaactcagtatggaccaaagatgtaagtgtaaaagctaaaactataaaaatcttagaggaaaacatgaagacaaattttcatgacattggatttggcaataattttttcgatatgaaaccaaaaacacagacaacaaaaacagtagataaattggacttcatcagaattaaaaacatttatgcatcaaagaccagtatcatcagagtgaaactgcaacctatggagtaaaaactaaattgcatattatatatctgataatggataatattcagaatatagaaagaactactacatctctacaataaaaaccaaaaacccaatttaaaaatgtgcaaaggactttaatagatatttttccaaagatgtacgaatggcaataagcatgtgaaaagatgctcaacatgctaactattggagaaatgcaaatcaaaaccacaataggatatctcttcatgccctttaatatggatattattaaaataccagagaataacaagtagtggggagaatgtagaaaaattgaaatcctcgtagcattgctggtaaaaatgtacaatggtgcatccactgtggaaaacactatggtgattcctcaaaaaattaagcataaaattgacatgtggtccaggaatttcacttctgtgtatatatctgaaagaactaagagcaagaaaatgaacagatatttatgtggccatgtttataatagccttcattacaatagccaaaaggtggaagcaactcaggtgtccgctgatgaataagtggataaacaaaatgtgatatgtacacacaatgagatattgtccatccttcaaaaggaagaaaattatgacacaagccacagcctggataaaacgttaaggcgctgtctaagcaaaataagccagccacaaaaggcaagcactgtatgagttcatgacatcaggctcaaaaaaaaaaaaaaaaaaatcaaaaaaacctaagttttgaatatacagttaaaaaaacaaaaaaaaaaatagaaagaaaataaatgaagaggtaaaaagtggaatgatagtcaccagggaaaggtcagagagggaatcgggaaatgactgtttaatgggtacagagtttcagtttgggaagataataaaagttttggagatggattattgtgatggttgcaccatgatttgtacttgatgccactgaagtgtacacttgaaaatgcttacaatggtaaattttgttatttacactttaccacaattaaaaatggttattttaaaaagacaataacaacattattttaagggcttttgatacacagtgccctcctgaaaggatatcctatttatactcttaccaacagtgtaagagctccacctcacaacaccaaatattaatataaaaataccttttaattaactaaattttaaaataaagccttatagatgctatctctcgaggggaagaccgtgtctatgctgttctagctctctcaataaacatcttcattcaattcagctataccgacacctggaatgcgcccaactgggtacttcgaatttagctgatggagtaattgggccaagaagtagtttagaccttggttctccaaaaaaagttttaaaaaattaaatgatcaaatacaatgctgactcttaaaattatgcaaattacatgaaaagattcaagaggactcaaaacattgaaatagatcttcaacaaagcggggtgatggttggcaattgacccgggccacatcttcatcggcatctccacattcaacatatctttgtgttctattaattctttttttcccagagctcatatctatccactggtcccatttatgctttcaacatcttggtgcagagttccatatttatctgttgggaatatagatcccaacagataagagggactccaactccaatccatcctgcacacctgcacacaagctgtcacttcattttcctcagtcatcaacttaattatgtcctccacattctttaacacctgaaaatgttctctattattcataaagcaaaactccaacatttaaagtattcaaatgcaaccacccaaagcccttgccattttgtaatcattgtcttcaagtcagtccacatccactcgcttattcatttattcattctttcttttcacatcaagcaatgtttttgtccctaggatacaatggcaagcaaaatagagctttcagtcaaacaagaaaaaataggcaagaaatagtgaattataagaaaatatgatgggtttgagaagagaaatgtggggcgctctggggccatgtggcaggagaccctcattggatgtggaaggctttctggaatgctgcccttcagctgaaacctgaaatatgaggaaggatcagaatctttggaaatggaggaggaacacatcaaggtattaacatccagagtggcatcctgtgagaagaaaggcccacggcaagaaagagtaagcatgaggtgtgtgagaaactgagatgagggctgtgtggctgaggtggacacaaatagagaaaagttaccaggaacacagaggagggggagatctgttagcacgctttcagaaacctaagtgagaggtaacagtgacgtaacctaagatggttgtacaagagcggaggctgctgggtctgagagatattcaggacctgtcatttgattgaatgatggaaatgaggtagagggtaaggcaggccttgatctcaaggcccttagactcgggtaccgcagctctgagcagtggctgcagtttgacagtgacatgagcgtgaggggctagacacagtaaaggctgggacactagagtgagcatggtatgtctgttcattacctgtggttgctgtgccaatccccacaaacctggtggtttcaaacaagacagatgttttcttttatggttcaggagaacaggagtttacaatcaaagtgtcagcagaacttaattccttctgaaggcttcaagagagaatctgttttcttgcctcttctgacttccagacactgcctgcattcttagacctctggccccttcttcacatcactgcaaactctgcttctgttcacaggtcctcctggtgactctgaccccataaccctcctccttaccttgtgcatacccaagcgatctagagtaatctccctatctcaagatttttaactgacttacattagcaatgttccttttgtcatgtaagacagttcacaggtcccagggattaggacattttggggtggtggaatgggcattattctgtctatcactatgtgtgtagatgagttttagttcatttgtccaactttccgagtatctgagcatcagctgcgtgctaagcactgtgctagaatctggggttatgacaatacacctcctgcctttgtggagttcacattgtcctaagtcaataagcacatatattttataatatcataggtttcgtggtggaatagccaagaaggggtatatttggtagttaaatttgggctctggaatcagacagaagctcaactcccagttcctccactcgttagctgaacttgggcagacaatgtatcctctcaaagttacctcaactatgaaatggggatcgtccaccgtaaagggacactgggaggactaaggaggcaatccatgcaaaatatgtagccaacaaatggcagttatcatattgtcatagtcactttttgtcttacattttggttatgaatgcatacatctatatcctgagttcaagcataaatgtttctaaagattaaagattaaaaatatgttttatgcatttgtttagctacaatgccttacaaaataaaatgtctgttgaaataaatcaccaggtttggcttcaaacttggagtgtctgaatcataacattatatatttggctgtatggatcactacatctcagagaaaccacatggcaatcctgcccctccctcttcacctatcaacaatggcgcctctatagaggatcaagaagtatgtaatgtacactttttgatgtggaaaattttaagttttgtgcactgctgggaaggagcatgagacaaagatttccagagagaagtctgctagaagataagacaaacacttgaacacttaacagtataatccaagaacaaaatgaaaatcaaaagattactctggatcagtggctaagtaatgggtacagagaacaagcaatttggattggaggaaggcaaactcattgttgttatggtgatctcttctggaagaagtagaaccggaaccgtgaccttagcaaatgggtagaattcttaaggagatggccagtggaagcacaggttcaggaggccaggaaaccagttttgctgaagcaaaaggccattctacagaagggtagcaaataaacccaacaagacaatttgggattaaactatgcgaacattcgctaccaagctaaaaagttttaaactctcctgtgtagtcaaataccagccacatcttttttctcagtttagaaaatgtacaaaaaatacatttcttcatattaatgtaaatttagataaatttcaatgataatatactaatacttcggatttagtaacttgagtgacaagaaggtgggagtgaagaggaagaaagaagaaggcagtgtccctagctaatgtctaacagacaagacaggcggtatcaaggctcccaaaggaatgtctcatctcatgtagccaatggaagaaaatggaaacctactgctttaaagacttctggcatatcctcgggtagagttgttttgtttttttaaacagatatttatatttagtttggtgttccaaaaaagttaactactgttattttttcttccccaaaaaagttcatttaagaaagctgttgctttttgcatctgttatgcagttgaacatctgtgaaccatgaattaacccactgctctcctgatgaagtttgagaacactggggacattcaaggggcattcccagtgcccccctaagatggtggcttcctacaagcgcactgccaggcccaatgctgggcaaaatgcacaggagtcctctgtccttagagagctgatagttttcatccctgctcttctctttcaagtgcaaaatacaacaggattcgatatggatggaagttgtcatggggttcctaggcacccttagagctgtccctacttggttttacagatcacctcccacctctgtctgcattctcagtcctctgagcatgtcactaaaatctcaaaaaagtcctcaagcaagtcaaatgaaaataaattgcatgtgtttgtatacttatagttatttatcattttggcagttaggtattgcatgtctacaatggcccaaacactgtattaataatatttttaaagactggaagagaatctccccaaaataaagaaggatggccagagagggaagtaagaattattgagtacctccctcactccatggcaggttcttcagatggctcatcaagtggtaccattctcacttcaccaaactgagatataagcctggtcccatatgtcctgaatggcagaactggtgaataagccacagtatctgactccccggccttcttctgtgacactaccaattcagggtgcccaacttctttggccaattgctcaatgaattccctcacactccaaattgaaaaaaagacaacactcattctgctgttgggaccttggaaagcagtgtggtggaggggaaagaatggcagctttgtttatatcacaatagatcatttgtataataggagatctgagtcttctcctccttggccacttactacctctgggaccttggcaattttgtcacctctacagtagggatggcaaacaacacatcatgtaagactcctagtacctggcaatgctctcaaaataagacaccttaggtgataagggctggctgcaaattttagtgttgtggtttgaaatgaagtagaagttttaaaacaagtgacagaatttaaggggtttttccttgcctttcattgatggcaatggcacggtttccaggatgcttgctgccacctctccagggtcccatggcagggtcaaagcacagcactgtgcttgccagtggctctcagacccctacctgcaaaggcaggtgctcaaacgtggctcttttcctataggtgaagaaaggatgctgggacaggcagcggagacagatgctgtgagactgtcaaagtcataactgcaactctttctggttcccaacacactcagaccttcctggaatggcccagggagactgtgactgctgcggcagccaggaggcacaagcagagcctcccaagtcctctaggatttagccaagggtagcattggctgcaggaagggtgtcaggtccagatgactgactctgatgagctctcagaaccagatttaaaagtgacagtgaagccctggggaaaatgtcctaagcaaatgggattagaatacaaattgtgtttgactgagagcccttgcgggcaccttggccccaagggacaataggttgctttgggatagctgagagaaaaaggctttttgacaagcgttcaagagctcacttcacaaacactctgttcatttctcccccagcccctttctctaccttgtgaaatcatctacagcctctccatttgggttgaggtgaagaggataggtaagcagtataatatgttcagcagctctgccctgcaggtgagggtagagaatattatggaaaaaaacaattattgataatcaggaatattcattgtgaagtataagcaccatcccacagggaaaaatggtaggatagtcacccgggaactgaaggctgtggctgctgccccagagactggggggcctaccctgccctgaggagctggggttggcttaggctgcacattctctcccaatagagaatcagatctgctcattcactctaaggtatgaatgactagataagtgttacttctctcagaaatacttgtatctttatactccctttctaacaaatgacatgaaatagctaaatttatgttccacataatgatagttcggccaatgatggaccacatatatgatagtggtctcataatattataatatggtattttttactgaaccttttctatgtgtggagacacaaatccttagtactgtgttccagttgcctacagtgtcagcacagtgacatgctgtgcagctgtgtaccctaggagcagtaggctccaccgtacagctgaggtgtgtagtaggctgtaccacctaggtgtgtataagtgcattctgtgaagttcacacatgatgacatgttgctgtcatacaaaagcttcttagctcattcctttttgctccagtttcaccctactccagcctcagcccacttcaattcatgccatatgttatcacctgtttgtttttcctaaacaattgctccaattgttttctcttcacaacaaggccttgaggagttctcattgctttcaggaagaatcctcatctctaaacttgaccttcagactcctccgtctgacccaattggctttctaagcctgcaatgccctcatctccaacacagaagttctcctcaagtgctcctccgactattttatgaaaaacccccaggtttttatagatcctacctggcacatgctctcttctgtaccttaaatacctctcacctttctttgtctcttataaaattctgcccattcttaaagaggctttcaaatttgaaacttttctggaaccaactaagttcacaataatctctgccacctctaaacaattaaaatccttacagtctctgacacttagacagcattgccttacagtagtcatcattttatttgtttacatttagtcttcccaaattacactgcaataagccgcttaaagttgagacctgatttattctaccttccctgcaatcccagaataatggcaaagacctccattttcaaggggaaaccatcatcaggggatgttgactctatggatctggactgaagctaatggaactccacgaaactagagattattatttttttaatcccagaagtcaagtttgaaatcccaacttgaaataaaacaacatgattttctcacaaaagaaaacactcttcacagtttttgaccatcactcccttgagaatgagctctaagactgcactaatgagtctattagaattaattagactaatctgaaattatttgcttaatctagggacaatctcatggtggagaaagcccccagagagaagctgaccagagggtggaaaagcctcacagctcccccatccctgtgacagatgcaactcacacagctggtcccagacaatctggcaaatgtcacgaggaaggagggcaggtgagaaagctggcaaagtgtgatgtcctttctttccctggtccctgccaccctgaccagtggtaggatttctggaaacccagcagaatgctgtgattctgccagtcatcctgaagtgggcttgatcctaacacatctgaccacaagagctgatctttctattgcactttgtgctttggcagaccccaactattggctgacttttggaggaaaaagtgaaaagagcaactaaccattgaaagcaaacagggatgggaatgctgtcctttgtgccttgctcaggacaagccatgtttgtctgcatttccagagatgcttaagaaggcttttttgtggctagagagatcattcagggtcaatccaaacaaagctggtccctgacacagactctctgaaaaggcagagagttggcaaattttgttccctgagctgtccaccaaatcaacaaactaactgcatccctactaaggaaaaggcttctgttagatgacgtagtgtgataggagctacgaagcaggataagacatgatccctgtccttgaagacatcagtctatatggaaagatacaactcaagtacattaaagacagctagcaatacaggaaatgagtagttcagaaaacaaacaacagtctacagctcagcattgggagggatcactgggaggttggaatgactagggatggcttcctaagagaagttgcactgaagtcagaacttgaaaggaagattttggagaaacagaagaatggaacggatgcagaagcaatcaaaggaatatgtaaaatagagtgaagaagcctttatatactgatatggaatgatctccaagaaatgttggtaggtaaaagggcaagatgcagagctgagtgtattgtatgctatcatttatgtaagaggaagagacagacagagagctagagagaatattggcttgtatatgcatataagattttggaaggatactgagaactaatgacattgatcatcttgggagaggggaactggttggctggggcataggcatggaagaaagacacagatattccactgtattcccttctgtatcttttaaaatatgaaacatgatttcttaaaaaaaacaagagtaaaaaaccggagtggaagaagcaatagaatacttacagcatattttacggactacttgaggtaaaacagaaggattgaggagtagtaaaatgtttccatgatgctcatgacagggtctaaaattgaataggttattttcaaaacatggatatgctataaagagaaactgaggtcaggagtcattgaagacagagggagtagagaaaagacacttgtagtttaagggtgtggaaatggtccctggtccctgcaaccctgaccagcaggaggatttctggaaacctagcagaatgccatgattctgccagtcatcctgaagtgggcttgaccctaacacgtctgaccatgagagctgatctttctattgcactttgtgctttgacagaccccacctattggctgacttttggaggaaaatggaagtgagaatgaaaagttaagtttgattttttttttctactgtcaaaaagacaagtgaacccttttaacacactgtctttcagagatgaagctcttttagttgcttttcttttctgcacacaacatttcaccactaatcctcaaatcctctgcaaatgccagaagccgggccaagcctttgcctggtgaaactttagtagtacaatatggcctttcaatagaaatgcatttctctgcattatcttctcgtgatcacaaagaaataggagacaatgggccatgtgtcttggaggaagcagtgctgcttacatggtcccagtcaggcacaagaaagtcctgacggtatttagggagcagcgtttcagagcatcattgccacctgggcaaaggtggggaagaggtttccatcatgaacggaatagctcttacttccataatgatgtgatgcagatcaggcaaaccccgatcttcggctgccattctgcttggctgagagctgttttaggggatcgaggagctctcagggccacatcacctgggctcaacagggtatcttgctgagtttgaatgctgagactgccagcagagccccaaatagtcctcggatccagaaatagcctgtggcaattatgttttgtcttcctactgcaaggaatcctttcattttttctcatctgtgaagacaaatcttccagtgtttctggcaaatgaaagtccaagattagctgaaaatatctatgaacagaccctgcagcaattggcaatctcgtccctggggtatggagatactaacaggatcctaataactggaacaggaagcactgctgcaccacccttccccagtcctgtcccagccctccagtgatccagcgcccaaccccacctgcccacacactaatggcccacagctaacccaaaggacaacattttaccattttactaagggacaaagaaccatactgatgctgcattttctgtccctgggactgtctctccctctctgtttcatactgggagctcacaaaggctgagacttcaaatcattcttcaggaaagatgagtctataatatcacacttacttacctagactacttctggaacttgactttgacctccccctaaggcaggcaacaaggttgacaaaggttaatagcaggaaacagcacagaaacctaacccagtctcgaattttaaataaacccagatagagaggcctgaggatgaggagatggcctccattgaaaacaaaacacattgtgtctgataaaaggatgctagctttctcctgcagcatcgaaattcctgtgaaaatgtttgttcagtcttattttaaaattgtgtggctaaataggtttgctgactttaaagttgcctgcaattttaaataatttcaacccctttaaaaagttgaattgctgagtcaagtacttagagacaaggaaataggggttggttagtgaacaaggttactccatgttttgttactacaaaaaagcaccccacagagaacaaaggaaaacaaaatcagacgagactcaaaaagagaggggagccgtcttgagatctctatgcataatcttcccaactgttccacaaaagtctcagagttcagtctcttgggacacatctgggcccctgcctatttcttgttgcttccattggctaggcctggatcactggccatctctggatctaactttgtgcccagtacatccaacccacatgggcagggctggtggaagggttggcttcccaagagctatctgcatactaataaccggaaaaagaagaaggaaatgttgtacacacttacaaagctttttaagaatatgctatactgagcataatattttacagagtaacactttaataaagacatatttgtgattggaatggattctaattgagaatgggctgagctaaaaagggttaaagcaaagctattactgactagctacgaatagaaatagtatacctctttggtacatagaagaccccatcatctttttacattctattttttcctacttgttatttatttatttcatttaataagtaaattagcttaagtcttgttatcatacatagttatattcttaatgtaaacatgaatttaatattccttgagggctcttaattggccagtctctgactgaactagaatgcatggtacgtgcttcacgccaaggatatcacagtctgctataaaggaccagagcccagataggaaagtagatggactctttgtaacacacattgtaaaaatcccagctgtcaatcatgtttctcatttttatcaggtctacctacttctaaagtgaacaactagaatgccattcatttatgaattcaaaagctgttatcaatcaccagctgtttaccagccactgttctaggtaagcatgttattcttgaagagattacagtctcatgtagaagaagaataagaaatagacgagtttcctgaactgtactaagtttaaagtcaggtaaaatcatagggtgctgtggaagcacagaaaaggcatctcaagccctgctgcggctgggggtatggggcaaggtagccatgattcctggagaggtggattcttgaaggagagaagggcggggctggaggagcatggacccgcagaacccagctcactctggttgccctccaagacttggcctgaacctacttctttcagattcattctttgcatgaaaagacagatggcaggaagtcggggtgagagagaatataggagaggagggtggggagtctcggatgtgctggggcactggcctttgagtgcacacagcaagcgcctgcttccttcagagattatgtcaaagacagaggatcctcaggaggtaccagtgacgtgcacacatatgggagggaatgctcctgccaaggaagcacatcctgccaagcagtgcaggcacctaccacggttaccaagaaagtttttggcaatccgtgggacatgccacctttaccccctaggcctgaaacaaggaggccctggctgctcttctataccctgttgctgttatggaaatatttcggcagtttttaaataatagtattcctacacaactgaatgtttcagaaatgtttgttttttattttttattgtgtgtagggtttttgttttgtttttgtggtttttttttgttgtttttttgttgttgttgttgttttgccacctagcatcacgtccaagacaatacaaatatttcaagccacataggatgcaaatgcaacaaacagtcacctctttgacattgcagacctcaggagaaacaatcactcatttctcctcctctcttttcacctttctcctcctccaaccattttctatcttcttttgtttttttatccattacagacaaagagacaaccccacaacatccagcctatgctcatggaccttccaaacaagaagcaccagacagaaagcgtcctctctgtcccattgcagtaacacaaaggaaaaggaaggatttgagattttgcaaaagaattaatagcatcttcacagagctgagattgcaggaacaatctctttccttcataaacctaccagctctctctctctttttcttaggttgagaaaataagagagacatcagcaggagagttgactgctgaaatccagtcttaacctttgaaaatataatttatttaaacccagcgtattacagaaagcccagcgtggatggcggattaggtggctgaggcagcttcagtcaaagaacaggataaactgagtgtctcccctgagatcattcctacgggatgaaaatgctttcagccaagatactgaaataaaaggtccttgcctggtgggagaatggatggtaggtgagatggcagtggagcctcccaggggcaatggctagtgagtagcaagctgcatccatttggaaatctccctgggagtgcaaagaggatgaaggacaaaatggcttcaaaagcttctaaggaccaccagcaaaatcatggcccagacagggctctccctatattcacacagctgtcaccacccaattgacctggcaaagtaaacaggagaccaaggcatgtctggaaaacacgtttgggccaaaaacccattaaggtaattttcaacatacaggctcatcctctggggacttacagctactcccttgatggaactataagtagacaaacagtacaacatctacttactctcccaaagcctgtcaaagttgctgtagaccgacccaaatggcctgattggggtgcacagagagaagtgagtaaagagagagaagaaacaccaagacaaattctacatacactttttgtactctgttgttagttttttttttttctgatccaaaatgaacttcataggagaaatttagtatcagtgaaaatgggctcaattgcacagttcagatttcaaatattttccctgtgtagcaatcattcgtagtgaatttgcctttttttcagtaggaaagaagtcacaggacattcattcatgtattcattcaacagaaatacattgggcatttgtgatgtgttggaccctatggaggtagtgggcaatgcagcaatgaacaaagtaatcccaacacttgcattcctgaagcagatcatctggcaggaaaggcagactttgtcctggtgatgattaataccaggagtgtcgaggagaacggcaagacagggcaagcagtgagaagcaccccggagggccggtagttttggcccatttcacacccccgctggctctccttgccatcatttacattctgaaatcagagtataaaacctcctcccaggaacctgtctaaaaataagttggccattcataaattatggcatcaatacagaagccatgtattgttttccctccattttcaggcactagactgggtgtgaaggggagaggcggataagactcaatggcagagggctgacttttacaaaacaggacccttgggaaatgcacagcttaactgcgcacaaccctccctgaggtttgccacaggaaggtcagttacaagccagcagtgccccctgcccatcaaggggatgtctacacttagcaaaagtttggttgtttctccattacagttgtttttccccccacgtttttctgttcgccctcttctgccttcagcacacgaagagtagccatcgctctttgccttctgtttagcatagattttagaggatgcaaaataataactatctctggtcccctttaacctgttctctgggcttgtctctgcagaatgggtggctagcaatttcacaaagaatagatcttttcactttcaacacggtgaatgccctggcttctaatcccagttagcactcccacaggaatacatcagacacctgcgatcctcagtgcactagaggtggcagtgggtggaaaatgcacatcacagccattcaggacttcagaaatgctttgaatcccattcattttcaaaatttaggctaggattattggtggaagtttgatgcgggttttttttcttttagagtagaggtggacaggaccttttctacactgtccacagtaacgcaactgtaaagaaatctaagctgggacctgggatgtccttggcaggaagcacaaaccagccgcatgtccatcacgggccaggcattccttagtttgggaagatccttcaagagagaggaaggactggagacttttctcaatctcctggggagaacatttataactttctgaagaataaccaaactatgtacaatttgccctcagttctcttcagagactgaaaagacagtgataacttgaaatacttacgtaggggtaaccaaagacgagattttatctgctgctgttgtgaaccaaattagatatattttgaggaaagggtgtatgtatattagattttaattaagtagtgttaattataatctatgagatgtgcttactgcttatcagataattatgagaaagccaatttggctgctggcttgcgactaattaagtggaattagtaatgataattatagatttcattttggtttgcctttattggaaaaggggcaaatctgctttggctaagatgcgtcagggtggcagtacagaatccccaaacccctggagaacatcctgagcttcgagacatcgggaatggcaggaggatgaaaggatcagcctctgttgtggcctcctgcctgcctctcccagcatcacaatcttaccagactagtccttctcccctgcctctccctccagcacctcctccttcttccagtacagagaagttccccagtccattttagcgaggaagaggtttgactccgagtaagagactttagtgacctgaccaagggtctcggacctgaatttgagagaacagggaccatctgtgctcctgttgtgtagatcgtgtcatagtttgtggggtcatggggagaaggaatggctcacagcatcctccatgtcccaaccccaaatataccacctgtactgcttaagagaatcattgtatattgcaaattgatcggtttctttcaagccatctttcttccagaagttacgtaacacaaatggagtaagacaaataattgaagtacaggatctacttcctttgaaaggccattgaaaccaacctaaactatagacaaactaaaacgatactttctgtttcatgtttccatgtgaaacactattgtgaggtttcaattgcatgtctcctcatttaacattcgcttatgcctttaatattagaattggaattccttgagaactgatgctgtaaccatttttttttttcaattctgaatgcctgctactcaccctggagctgtggcacctgaggcaccagagttaaataaagaaacaagtcacgccatcctaatttcatcccaggccatcactttgtagcatttttctcttgggcaaatcacttaatctacctaagccttgggttgcttcattgcttttctttttttgtatctgtataatggagatgataacaggacgcactttaaaggatacgtaaaatgacttatgtagcgtttagcacaattcttggcccacagcaagcgctctgcaaatctgtgtttctcagttggtccatgagctgcctgcagctgaacctcttggaggaactgtaacagatgcagcatctcagcctacctcagacccattgaatcagaaactcaaactaaggcccaggtgtctgcattttccacaagcattccccagaggattctcacgcacagtggcacattcatggccatcacaagcaatatcagctctgtgtagagtcccagtgcacatcagcataccacaccaaatgtaaggaacattcttggggtgggctcagccctacctcagcctgagtcatgaccagaacagattaaaggagttaagacaggtaaattggcaacctggaagctccatagcctatgtgttgtcattactgtcagaaatgcagccccagtcaagagccctcgcagaacagactttgctgtgcacacaggccctgaagggcttcttgcagagcttggaggcaagaagggcagcacaccaaaggaatcctacagtgactcaggtcaagcgtcacacaattgaccctgccactgctcacactgttgagtggggtcctcacccatttgggccccacccaagtcgcacagtctcgaggagcccatatgctgggaaccagctccacaccacagaggaccacacacacccaccgaacaaatgacacccatggcttaattatatctttggaatccacccccattgtgcacattcttgagaaaagccaccaccggcctctccacccacgatgctaaggcctggcctggccttcgaagagcactgatctctaagcttgccttgctaataccacctgctttctgagcaccacccaaggagccagcccgggaggcttgtcacctcaaaatcaagaaaaaggggaacgtttctaaaaggggcagtgcctaacttaaccaatttctgcacactcattctgtggaccccaatccaagacacacagtgctctgggctccccactttttccttcttagagcaggcatcccagcacatccaccccttcccttcccttgatcggatggcttggtctcagtcctgatctcctacatctacagctaacccatgcttgctcatccattcactggtgatctcttgccctgaactggctctgttgaatctctcacatctcatgaggtgctattatcactgtatttatttgacagatgaggaaactgtggtccggagggttgcctgccttgtccttgttcatgtaacctggagtggtagaaccaggctttggccttgctctgcacctcggcatcccactgccttctgctttttctgagttcagtgagtgtgtgctcgtcccatccttaccagtgtccagggccttctgccttccacttgctcgccacgtgacttaagagccacagtgtctggtttatgatctgctccctctttgagacttgaactatgccctcaggcagcatcactcaggctcttgttctgactgtaaaatcctatccattctctaccaggtctggattaaacctcctatcatgcatgaaactctttctgaccccttttctgtaaaacactatctccttcccctgaaaccttgttgtgccagctaactgtcttgtattattatgcatctattccagtgccatccatatctgactttcctaagttggagataaactgcttacagaggatcatgcaacatttgtatttttaagcccaatggcatctaccatagagctttgcctgtagttgatacaatactgaatgggatgactgaataatctggacctaaattacttgctttgtgtatgaagtctcacttctgtgtcatgctggaattattttccacttaattacatgccatggcaccaagaatgcaaaggcttttgttcacactgagtggggcccaggcacttgggggctctggccaggcctatgtagacataggtggcaaagataactgaagagattacttagatgaatagctcaccaatgctaaataattttatcgagattaaccatatatgactgtgaagttgtaacacaaatttgggaccaggatttcatcatgaagctaattcaatttgagacattcattgaacagcttataaatacaaaagtacacgaggctgcctctgtcccaaaagagtttacaatcaaatataacattagagcttaaaagacccttaaataataagaatctaatcacctcattttacaggagagaagagtcaagcccagaaaagggaaattactgatcaatggccacacagcttcccaggggcagacacagtattagagcccaagtctctgccattgtaccataattcttctccccagttaaaaaaataaataaataaataaataaataaataaataaatgtatgtatgtaactgtggctacaattttagatagagaaaataaaatgtattcaggccatccatgggaattattttgtagcagaggtccacaaaagatcatgtatcttaaatcagtggtgaaatccattgtttattgataggttttattccactatgaaaaataggctatgactacactaggtgctatatcagaggtctgtctgagttaagcctcgagaaacagtttaaatttacacagggtgagatgagacagaaaaaaagggggaaagttaaatgaaataatgtgcaggacagtgttcataacctttaaacaaaactaatgtaaggtgttgactattcaacgggatggaggagtacaggaaggagggatgggacactgaggcccttctattccagggatggcaagtaaaatggaccgacctaaaggtctgatttctaggagatgagagaggaaacctgaggtcagaaacctaatgggcttcgagtgtcatgacaaggagtctgtactaaagaaattccaagtggtgcagtctccataaagcagaaacctgggcacttagaggaatcggaatcagagtaaagcagatagctctgtcactaaggcacagccttggaagtggaagcaaggaagtcagaaaagcacagtaactgaaaattcagggaaccctgaagctgggttttcaactccacacaactcatcaatatagatcaatggtggtgagaggagtcacagatatttgggaggacaatgatgccaacggtgtcatcagtgacatgggaagagaacatctgagaggaaatgggagtttgaaatcagacgtcctgcatttgaggcagcagacaacatggagttaagggtggctagcgaggtgttccttgttagcatatctggttcaccggtttcatacgggaaagcatgggttttacaaatttacaacagcaaaaatatcaacaatgtctgtgaaaagcccctggaggatctgggtgctgccttacacctgagtgggagggagggtaggcagtggccacaaccagaagggagggtggccggggcatggcagtgaggggtgagtgggaggaggctgctgaatgctcctgttacctctgtcccatctcacccttgagcaaaatgagcctgttctgtcaccactgaaatcagctaccagagctttaagattcaataaagatggcagcataaataaatgggatgaagaaaattgatgttatgaaaactagcttattatatggagaaaaataaagcttgttatctattttaactcagcaaagatagacacagtatagattaaaaattaaaatgatgagggtaaaactgagaattcaacagaaaaaaaaatagaagaatatcttcatgacctggggtagagaatgttggcttaaacaaacgcccaaaatgttacacaaaaaatatatacatttgatcacattgaaattaaaaattcacttcaacagagaacatgatagaattaacagataataatagactagaaaacaatatttgaagtgtctaaaaactgatatggctagtatttagaatatacaaagaatgcatataaggaaaaagacaataacctcaataaaaatgtgggcaaaatatttgaatgagaaattttaagaggagaaaaaacaaatgccttacaaatatataaaaagaaaattatttagtaattagaaaaatgttgaggtaaaacaaaaatgaaataccagtttgtatctggaagaatggcaaaatttaggaaatactgaagaaagtgaagagtaggacatccatagcattgtagttggaaatgcgcactagagctgatagataggcagatagatagatagatagatagatagataatagatatagatagatagatagctaatagatagatatgatagataacatagataaatagatgattgatagattaaatagatagataataggcagattagctagattgattgataaatagaaaaagagagacagtcttctagatttatagatggatagatagatgataaacagattagatacatagatacatagatgatagattagatagatagataactagacaaaggaatggatgatagattagatagattcatagatagaaagagatttatagatagataaatagatatatagataatagattaggtagatagacagattagataaatagatgatagatagatagatagatagatagatagatagatagatagatagataaaataggcagattagatagattcatagattcatagagagaaaaagagatttatagatggatagatacatagatgatagatagatagatagatagatagatagataggatggatacatagatgatagatggatagatagattcatagagagacttatagatagatgtatttatagatgaatagatgatggatagattcatagatgaaagatagatagattagacagatagatagacagattatatagataggtagatagaaagatagctagctagctagatagatagatagacaaatagatggacagattagatagatagatagatagatagatagatagatagatagatagatagatagattcatagatgaatagatagattagatagatgatagatagatgattgatagatagatgatagatggatagatagatagataggtagatagatagatagatagatagatagatgtaagagcctaaaaagcacacattaaatgtgtttgaattattctttacagggggatggcagtggaaaatggggatatcaaagaataactccataaataaaacaagaaaaaggtcttaactgcgtggtccaatgatgataatgtcccatgaatgagatattcaatattctatatctaggtttctaaattcaaaaaaaatccagccagcagttggaaatacgaattggtaactcagagaactgagataaaaaggagggattggcagatgcacacctagaagtgacagccaaatccacaggtaggtagtggatatgttgccaaagaacagagccaagaaaggaaatcaagaagaactgaggacacataacagatagtaaaaaccacaggaaaaaaataagcagaaacttttcaaattcatttataaggctacaaccatgctgtgacaaaatctaactggaaaatatttagaccaattttactaatgtgtatattgtaaaataatagtaaaatagaatttagtagcatattaaaaattgtaccatatccaagtagagttcatgtcatggacactagaagctttcaactatcaaagatttatcaatgataagttgttacattaaaatataaagggaaattactttcttggcattcaacaacattattactgttatatacttaacagttgttaaaattaacaactatatgtaacgaaaaagaaagtaaaaagaaaaataggaaaaaaggaaatttcctaaagcacataaatcttcatagcaaaaaccaacagcaaatattatatgaaattttgaagcacagaaagcaattccttaagcatgggaataaaaaaagaatatccagtactattttagagttttaaataaacactgtgagaagaaaaagagaaacatctattgtcatcgaaaaacaacatagttatctttttaaaaatacaaacacttcatttaaaaatgaaaacttgctaaggattcaataaagtgactggatataaaagaaatatacaaaaagcaatagctttgttttacaccagcattaagcagttataaagtacagttataagggaaaccctttcaaaacatcaaaatgtgtgacatacctaggaattaatgtaataagaaatgcacaaaacctatataaataaaactacaaaaattatggaggaatttttttaatgtcctgaatgaacagggaagtcacccatgatgaactaactcttgctgctgtaatcaaaagctacccttttcactggtgatctagattccaattcttctcatcttattggagactttgctcagtaaacaattttcctttctgcatcatcaagtttctttctgtaccagatcagtcctctcatataaatacccataacattacaagcaaactgaaataagacctgcattaccacatcagagcttgcagcaaaacatctccaaagagttccttagagttggtacattccatctgcattattctgggttccatatatgcaaatccacctacttgctaaaaattatttataacaacaaatcaatacttacagagcatttctggtcatttgtggatgtgtgcaaagcagtaaacacatttgagttgcctggcatgcacattcccagctgaggttaatcaaggtggtgctctgctttcttgtccaacgtttcacagtctacttagtgccatgttttttctgtttttttttcttttactttttgttggtgatttcactgtttaaaatggcccacaggcatagggctaaattgctgtatagtattcataagtgcaagaaggctataatgtgccttacagagaaaatatgtgtgttagaggatctttgtttaagcatgagttatagtgctgttgggttcaatgtacatgaatcaataatatatatgaattaagtctttgtgcaaaaacacacataacccaataaagaaccagaagcttgcaggaacctaaccctgtattttctctaggagcaatggtttcatattcactaagagaatgtttgtggtgattttatagaacattaccacaaatgacaaaaattgactgtatttctgtttcctctgtttcattctttcctcaactccagtcaagtttccaaactcaacatgtctttgtaatgactctggtgaaggtcaccaattacttttgcattgccagttccaaagggctgaagaatctgtcttcttccctcatcaaatttgactaccaacaacttcctacacagtagccacctctttttaaacacttctttttttttctcttcctcagaattacactatcaggtttttcttcctattccaatgcttgctccttcacagcctcctctgctgagtcttcctttcctcgacatctatgtgggatttcctcagagctctcttagcagcctcttctctgagaatcttatccaaaccgatggctttaacagataacaagatactaatgattctcaaatatctacactagcacacactactttgaactcaggacttgtaattccacttgcctcttgccgtctctactcggagggtactttagggtacacacagagtatgcggccattccttattctttgcagtcttgttccctctggcttgctctctctctctctctatctctcgctctctcccccccttctctcttctctctctctctttccctctctatctctcctttccctctctatctgtctccctcttcccctccaccccctacataaccaatgcatcaaaaactctctggctctatttccaaaacatatgccaaatccattagcatccctcaactcctctgatactgccatattccagagcccccatcattgttcattctgattacatcaacagttttctaaataacttcctacctcctctctttcctctctcaacacacacataatctattcttgtaaggtactagaataagctggtaaattgcaaatcaaatcattctcttatactcaaaaccctccaaaggcttcttactgtattcagaataatatccaaatcttttatcatgacccctgagactttacatgatctaatccttgtctgtctctgaccagggagaaaatacttcatcttgcagcgtgctccccactggtcttttgtgatcttttgaaatagacagtgtagttcccaccttagggcttgtgtcctggctgttccctctgtctaaaatgctcttctctcaaatttgtccttagctgactccttgtgatcaggtctcagctaaaacataactgtctctgagaagatttcctgaatataccatccaaacagacttcctctcaattatgttctatttgatcaacctggtgtttttctcttcatagggcacacattatctgaaatggtccctttgttttcttttattcatctgcttatcatgagtcctccccacaccactctgcacaatgtttaagtctaataacagcaggaactttggcaatcttgtctatctcagaggcaaggatagtttctagcaatagatcctaaatagatatttattgattgaatgtgtgatctgattgggaaatctcaatattgcagagatactctgtgtttgtgtgtgtgtgtgtgtgtgtgtgtgtgcgtgtgtgtaaatttaaagtaatcccaatcagaatctcagtgatgttggtgcttaacttatcaataagaagtcattctgtagcaaactgaatccaacagcacatcaaaaagataatgcaccatcatcaggtgggattcatcccagggatgcaaggatggttaaacatatacaaatcaataaatgtgatatatcgcataaacaaaaaaggataaaaatcatattatcatttcaatagatgcagaaaagggtaaaattcagcatccattcatgataaacatcctcaacaaagtagacatagaaggaacacacctcaacataataaaggacatatacaacaaactcacagccaacatcttacttaacagaaaagttgaaagcattccctctaagaaatggaacaagacaaagatacccacttttatcatttctattctccatagtactggaagtccttgccagaacaatcaggcaagagaaaaaaataaaaggcatccaaattggaaaagaagaagtcacattatccttgttcaatgatgatatgatcttatatctagaaaactctagataccaccaaaaatctcttatattagataaacaaatttcataaagtttcaggatacaaaattaacagaatcagtagtttctatacaccaatgatgatctaaccaagggctaaatcaagaatgcaaccccatttacaacagctaaagaaaataaaatatctaggaatatatgtaaccaagaaggtgaaagatacctacaaaattatgatggaataaatcatagatgacactaataaatggaaaaaattccatgcttatagattggaagaatcattactgaccaaagcaatctacagattcaatgcaatctttatcaaattaccaatgtcatttttcgcagaattataaaaaacaatgctaaatcttatatgggacaaaataaaaaccagaatagccacagcaatcccaagcaaaagaacaaagctggaagcatcacactacatgacttcaaattatacttcaaggctatggtaaccaaagctgcattgtactgacataaaaatacacacatagatcaatgggacagaagagagaacccaccccccacccccaaaagccatgtacctgcaaccagctggtttttgacaggatcaacaaaaatgtgcactggggaaaggacaccctcttcactaaatggtgttgggaaaattggatacccatatgcagaagaatgaaactggacccctatctctcaccacatgcaaaaactcaagatggattaaagacctaaaggtaagacctggaactataaaaatcctagaagaaagcctaagaaaaacttttctggacattggcctaggcaaagaatttatgaccaagttcccaaaagcaacttcagcaaagccaaaaatagataaatgggacttaattaaactaaaagcttctgcacagcaaaagaaacaatcaacaaagtcaacagaccacctaaagaacggtttaaaaaaaaaaactgtaaactatgcatctgacaaagggctaaatccagaatctacaaggaactcaaacaactcaacaaataaaaaaacaaataaccccatttaaaagtggacaaaggacataaacagacatttttcaaaggaagacgtataaatggccagcaaacatattaaaagtgctgaacatcactaatcagagaaatgtacattaaaacacaataagatgctatcttacaccagtcagaatgactattattaaaaagtcaaaaaacaacaggtgttagtgaggatgcagagactaaaaaatgcttatacactgttggcggaatgtaaattaatacaaaatagaactaccattcaatccatcaaccccactactggctatctacccaaagggaaataaatcattatttcaaaaagatacccacactcatatgtttattacagcactatttacaatagcaaagttatggaatcaagctaagtgtccatcaacagagaaatgaggaaaatgtgtgtgtgtgtgtatatacatatatatatatatatatttttttatacatgcacacacatatacatatacacacacatacatatttatacatacatatacatcctacatgcacacatgcacacaccatggaatactactcagtcataaaaaaatgaaatgtcttttgcagcaacatgcatggaactggagaccattatcgtaaataaaagtgaagatttaggtacctcataccaaatacatgaggagcttaaaatcagctatggctaaggatatataccctaaaatcagcaaatgctacatatcagggtttgttttactccttcagagagcttgttgtttcctgcacaccactgtgcccaggacgcatgcaagagaaaagttctgagggtgagaataaaaacaaagtggcataaggttgtaattctcaacaggaacccacctttctgagatttccatcccgacctacatattaaagatgaaaaatctccaaatgacctgctttttttgtagttcaatatttcactgtgagttctttgtattttacatgcagatatacttgaacattgtatattcctaatttttcatcttttgaatctcatattctgtaagacataaattgatacagccatcagtgaagcatgtggaggcccaggatggcaggcaaggtcagtgaagtaaaacgagggtcaggagtgagctactaaagccaatgaaagtgagaatcccaagaaaaggcaaatatgcttccaaataagccacctcctctcaacatggaagcccgggtcagcccaggagatataagtgagaccatgccactcctctgtggacaatggtcttccaatgactttccaactcaacaagaataaaagctcccatggcagtctctcctcctttcttgctttttttgatgattgaggcctccttccaatataccagccataatcctacatcagcagagaggctacatcccaaatggctgtcctcatggcttgctatctcatcccctttacatctttaaaatgtcatcttccttcaccctaggcccccgtcaacgttatgctgttccataactcttatccccttataccatagagtttattctttaactgccaatctcttctcactagaatggaagctgcatgaaggcagaattgctaagtgtcttgcttgctgctatatcccctgtacctagaacactgcctgacagagagtgagtaggtgtttattaaacatttatcgaatgaatgagtgagtgaatgagaagtcagcagtgtgaaattctatgggaaagttgatcaaaggtcaatgaactgggtaaggtctgtgcagtgtcggatgatgcccaggtcgacaacctcaggcaggaagagaagtgaggaggcaatcaatgggtgtgcagaagtcagcccagacactcccttgctgggcttgccagggctcacgtcccacctatgttgaggcctcctagtcactttacaccttcccctcagcatcacacagccttgaaaaatgtctctttccactcatttttggaaggcaccacgacacactaggtgaggggagaaaaacagttcatttgatcgatttcactgtaacggtcctcttgagaggagaagaggctgggctgggaacattcttattgtgtggttatagtttggctcctgctcataaacaatatttcccccaccctctctgcagatccttgtctaaggaattcctgctttctatttccactaaggacatcagggagcactgggaaaggggaaacatgggtaaaaagtacccataagctatgcgaggaatcccagaaaatcgcccagaggcagaatgtgactgaggcaggctgcagcagcatgatgaggtttgaaatcttctcgttgatccctttctatagaccagaaccccttttctggccacaggtccttggagagagagtcgcttccagcacatcaagaaagggaagcactgagcatttaccattcagttagcagagccgaaatgccagggggaacatgaggtcaggaaaagtgaaagaaggatcaggaactccaatcaggcaagacccagaaatagcagaactcttgtattctcactcacgaggcctttctatcctgggctcccacagcaagtgtcacaccttgattaaaacttagaatagcctggggtaggcaggagaggagatgaggaaagcacgctcaaatcagtgcctagaatcatacatggggtctcatccacagaaggaacacatgggaagctctcatcatgactgcatatgctggctttttcagcaggcaaacctcgccagtgctctgtcctgctctaaggaaaaacgtagcctggccaaaggtgtagactgagtggacaggaagggaagagggggagtggggaccatggagagctacagcagagctaggaatcaacctgcctccccaccgcactgggtcctgcttctctgggagaggatccatttcacaaacatgtgtttcctactgaatgctggcctcatatggatgcttttggcctttttttcttttagtacttaatcccctaggagacgaaactctcattccaaatcagcttttcacccacactttttctacccttgataacagccttatataaaagcaaagggaggaacaacccaaacgtcatgaagatttgaggctaaaatcatgggtaaaaaggctgctcagaagttgctggggtttttttaataacaaagtaagacatggccatatgaatggagagataagtcattagagactaaaacacgtcccagggttgcagaagaattaagttggagacaatgatgcccaacgatcaaaggggaaaataaaaagtaatcctgatgttaatatcagggagacagataagagctaagcaggcaattactgccaaaaaaaaaaaaaagtttaaattcagtgcccagtaaaatttctgaataaatattaacgggaaatttataagcacttagtggctaatggaaacttgagggaatgtcctaactgcgaggtctattacatggcagaatagtctattagatgcagaagcagtctccttggggatacagcagcaccatccctgtgggagtcatttaaaacaggatagaaaggcacactggagaatatgccataagaagcatcaggcaccaccacgaggcaaggagaagggttcagttaggctctgctccctttgggaaggaccacctgtcagtccttcggagcccagtatctgcatctcaaactgagggctcctctcccctcaaaactctccaatgcaccacctgggaccagtgatgacaagcgcaggattgaggagctcatgaccttgccccccagaaggccacccccatcctggctgggagcctctggcctgtacccttctgagagaagatggtaagagcacaggaagccagcctgcttaagcctggagccttgcacgccgggcaggcctcaggggccacccagcaccctttggggagatccatgaagggctcttgctgccattattacacaaatgacatacaactgtagacataagtagaaagtgaggataaatacacaaggcaccaaaataaagtcacctcgaatctcgttcagtcacatgggtgcatagccttcccccatgtgtacatgcatacttttttttacagaaatgagtttaaacatagcattttataacccatgaatatatttcaaaccaataagacacttctacaacatcttttcttaataaccattattccactgcataaaggcagtataacctatttctctattgttatacatctctttgtctccatttaaaaaaaaaataagcatgcatttagtggacatcattgcagtcatcttaattactacataagataaaatcataaaaataaaattgttgtgtcaaagagtatgcataatattttaagagttttttaatgttttagacatgaagtccctgcccatgcctatgtcctgaatggtaatgcctaggttttcttctagggtttttatggttttaggtctaacgtttaagtctttaaaattgacatatgggatctaattaaactaaagagcttctgcacagcgaaagaaactaccatcagagtgaacaggcaacccacaaaatgggagaaaattttcacatcctactcatctgacaaagggccaatatccagaatcaacaatgaactcaaacaaatttacaaaaaaaaaaaacacacaaccccatcaaaaagtgggcaaaggacatgaacagacacttctcattctcaaaagaagacatttatgcagccaaaaaaacacataaaaaaatgctcaccatcactggccatcagagaaatgcaaatcaaaaccacaatgagataccatctcacaccacttagaatggcgatcattaaaaagtcaggaaacaacaggtgctggacaggatgtggagaaataggaacacttttacactgttggtgggactgtaaactagttcaaccattgtggaagtcagtgtggcgattcctcagggatctagaactagaaataccatttgacccagccatcccattactgggtatatacccaaaggactataaatcatgctgctataaagacacaagcacacgtatgtttattgcggcactattcacaatagcaaagacttggaaccaagccaaatgtccaacaatgatagactggattaagaaaatgtggcacatatacaccatggaatactatgcagccataaaaaatgatgagttcatgtcctttgtagggacatggatgaagctggaaaccatcattctcagtaaactatagcaagaacaaaaagccaaacactgcatgttctcactcataggtgggaattgaacaatgagaacacatggacacaggaaggggaacatcacactctggggactgttgtggggcggggggacgggggagggatagcattgggagatatacctaatgctaaatgacgagttaatgggtgcagcacaccaacatggcacatgtatacatatgtaactaacctgcacattgtgcacatgtaccctaaaacttaaagtataataataataaaataataaaataaaataaaataaaagttttttcaattttatttttccataagttattggggtacaggtggtatttggttacatgagtaacttctttagtggtgatttgtgagagtttggtgcatcacccaagcagtatatgctgtaccatatttgtagtcttttatcccttgccccctgccactctttcccccaagtcaccgaagttcattgtatcattcttatgcctttgcatcctcatagcttagctcctttatatctgtgagaacatacaatgtttggttttccattcctgagttacttcacttagaataatagtctccagtctcattcaggtcactgcaaatgccattaattcattcctttttatggctgagtagtattccattgtatatataccacagtttctttatccactcattgattgattggtatttgggttggttccacgattttgcaattgtgaattgcactgctataaacatgcgtatgcaagtatattattcgaataatgacttcttttcctctgggtagatacccagtagtgggattgctggatctaatggtagttctacttttagttctttaaggaatctccacactgttttccatagtggctgttttagtttactttcccaccagcagtggagaagcgttccctgatcaccgcatccacaccagcatctaccgttttttgatttttttattatggccattcttgcaaaagtaaggtggtatcgcattgtggttctgatttgcatttctttgaccattagtgatattgagcattttttcatatgtctgttggccatttgtatatcttcttttgagaattgtctattcgtatccttaacccaccttttgatgggattttttttttcttactgatttgtttgactttgttgtagattctggatattagtcctttgtaagatgtatagattgtgaagattttctccccctctgtgggttgtctgttaactctgctgactgttccttttgccctgcaaaagcgcttttgtttaattaggtcccagctatttatcattgtttttattgcatttgcttttgggttcttggtcatgaaaaccttgcctaagccaatgtctggaagggttttaccaacgttatcttctagaatttttatagtttcacatcttaggcttaagtccttaatccaccttgagttgacttttgtataatgtgagagatgaggatctagtttcattctcctacatgtggctagccaattatcccagcatcatttgtggaaaagggtgtcttttcccactttatgtttttgtttgctttgtcaaagattagttggctataagtatttgggtttaattctgggttccctattctgttccattggtctatgtgcctatttttataccagtaccacactgttttgctgactatggcctaatagtacagtttgaaatcaggtagtgtgacgcctccagatttgtccttcttgcttaatcttgctttggctatgcaggttattttttggttccatatgaattttagaattgttttctctaactctgtgaagaaggatggtggtattttgatggggatgtgttgcatttgtagattgcttttgacagtatggtcattttcacaatgttggttctacccatccatgagcgtgggatgtgtttccatttgtttgtgtcatctatgatttctttcagcattgttttgtagttttccttgtagaagtcttttgattcttttgttaggtatattcctaagtattttatagcttttgcagctattgtaagaaggggttgagttcttaatttgattctccacttggtcactgttggtatatagaagagctactgatttgtgtacattaaacttgtatccagaaactttgctgaattcttttatcagttctaggagctttctggaggagtccttagggttttcaaggtaaacgattatattgtcagcaaacagggacagtttgacttcctctttaccaatttggatggcctttatttctttcccttgtctgatttctcttgctaggacttccagtactatattgaagaggagtggtgagcgtgggcatccctgtcttgttcccgttctcagaggtaatgctttcaacttttccccattcagtattatgttggctgtgcgtctgtcatagatggcttttattacattaaagtgtgtcccttgtatgccgattttgctgagagttttaatcataaagggatgctggattttgtctaatgctttttcaccaattattcttatgtttggtcgtttaacataatcccaaacttcttggagtctttgttcatattttcttattcttttttctttgtcattgttggattgggttaatttgaaggccttttcttcaagctctgaatttctttcttctacttgttcaattctattgttgagagtttccagagcattttgcatttctaaaagtgtgtccaaagtttcctgaatttttgatagttttttctttaagctatctatttccttgaatatttctcccttcacttcttgcttcattttttggattgcctttcattgagcgtttcctttctctggtcccccccgattcacttaataactaatctcctgacttctaatattttaggagctttgattcttgttactacgatgctttctggacaggtggaagctcccaccagcacagtgtgaaagtgagattttggtcacgtcgctcttgttaacagcatttctcctttgggccctcatgcctctggctttgagtatgcgtacagagcacacagccagctcagtccagctagtgtcaagcaggaaaggaaaaggaaggcccctttaaataggcagtttgtgctatttccccaaagagaaggaactcagcaaaaggctgcaaactgtcttagaaggaagaggctatctgcttgaaacagccaagacctttagctcaaatccattaatcctctttattaaacctgggtcacctctgagtcccggcaaattaaccagcatctccccactgcaagtgaatcgagagacagtgcactgcacactgcctgtcagtttcacggaccagggcaccagggtcagaaggcttcccaggctccatcctctgcttttgtcaatttaaaagggaacatcagctgcacttgtataaattacaggccaggctgtgtgagggccgggggccaaggcagcatctctgcaccaccggagaggagaggagagggtgccgggcaagcggcggttgctccaaggcttcccttcattccaacacctctgagtgtgtacaggagctctgaaggggtccagttcagagtccagagtgagcccaggtctctcccaggagcacctctcctggcttccctgcgttttctgctttactcccttccaaagctggcaaggaaggcctgaaattctacctttgctgggtcaagacatgaagtagagacaatgccagagccaaatgtggaagggccagagacagagggagacagaagaggagacagagagactgaggcagtgaaaggacacagacgagacccagaagagtcagagaaaagagagtcagaactagagcaatcccaggaaaccgggcacaatatcgcgcagggccccttctctccagccttcctcgcaccatctgggcctcccagggcctaagacaactgtacttgaaaatatagtgggtccttctccccacccatctggctaaagcttaacagttactcaaagaacaagtgcggtctcagctgcaagacaaatgtaggcacatagatgcaggccttattggaaccaaagtccagtagcgtcgcacatctgattttatgctccacttaataggaaggatatgaaaaccagggaggtcccaaaggagaactgcaaaaaggatttaagcatgagaaatgaatcttataaaacaaggcaggccagaggagtgatctgtggtcactttagatgtaagaataacagctaccatggatggagttatggaacccaacaggctctaagatggaatgatggctttatgtttacaagaaccctgtgtgatatgtggtaagattgttaccactgtacagatgactacaatgaggcacatgaggttctcctacatgttcaagtccacaaatcccaagcctggaagctacagggccagcgttggatcttgacctggaaccaccatggtatttatgccactgcagtcactgaaggacggtgacacaatgctccctgtccactgaggacaagctgaaaagccgtccagctccctccagaagtcaacgtttttgctgacctggcagcaaaccagcccatatggaaagtggagagtgagggaaaaagtcttgggaaccagggatttcgggcgaggggcaggcagggtcagaggaactagtgggcatgaaagcaagtttccttacacaacatctccatcgcattcccaataggaaagaaaaatggtgcctagctttgtttaatattttctcctgctatccaaatagtgttaacatctgttacatttccaatcgggaaacaaatacatgcatcagtgtatatgctaatgatccctggcctcccctcctgtgggggagaaatggaaccttaacccctttgccaccgtgctcactcttctgacctttccttggtcccaagggaagcccatgctttgagattttgaggctctttgtgggctgcactcgtagttcatctctaccctggaggcagactctctgatggatttgggagagaatatctcacagcctggaagaagggtcacccacctgctgcctgggagtagaagaggtttgttggggttttttttaaaataataataattggaaaaccttccaggagatcaaaaacaaatgaccaacaccaccagcagaaaaataaatatatatatatatatacacatatatatatgtgtgtgtatatatatatacacacatatatatgtgtatgtatatatatatacatacacatatatatatatatatttttttttttttttgaaagggagtctcactctgttgcccaggctggagtgcaatggtgagatctcggctcactgcaacctccgccccccgggttcaagcaattctcctgcctcagcctcccaagtagctgggattacaggcatgtgccaccacacccagctaatttttgtatttttagtagagacggggtttcaccatcttggccaggctggtcttgaactcctgacctcatgatccatccacctcagcctcccaaagtgctgggtttacaggcgtgagccaccgcacctggctaacttttttaaatcaaaggattaattcaattccaaacatcaaaggagaaatagcaaaaatcactatttcctctcatctcagcactagcacacagcatctgtgagcaggaaccaggagccggacctacctcactgagacccaggtcagtggggctgtgtctgccaccctggcgtgaacagtggatggattaactcctgtcaccaagagaatcctggcttctgtcagcttctctccaggccattatgctattaaaaacagagggtgttttgcatatttaaatactccaatgtcatttcactgacataatgccttctcctggcactgcgtatatttctcgagtctccagtgtcatgccctgggctgagagtaaggccaagagggaagcctcgctcccttcccaccacctcccctgcagggctcccattaagggaccaggagacaaggcgaggtgcccactagccagctcccatggcagctcctgcacggggagaattacccggctcgagtcctcctcctgcatctagccaatttctgctcccttaattcaagtcagttcttcctgaccccagcaggctggagttcccagagttactctcaacggatagcaccaattactgaggtgtgaaaatagaaaccttcgaattttgagaacaaactcagagactaggacttaactgaactgagaaagaaggcaggaaagtagagagggaggagtctgagtagggaggagagatgactccttgcaattaggaagcttgcagagggggagtgcacagtacagggctcctggggagggcagatgggggcgtggggcaggaggcttggagctgagacagtcctagcagaaaagaaaaaacaaaaacctgtggcagctccagcaccactagccattctgctgggacagagaatgctggggagctccaatctccccctgctcccaccacccacactgtgcagtgttgtctccttgcccgtaataagggatcaccgcaaacagaacatggagacacacaagcgccagattcacccgtccagcttctatacgctgtccacaggcaacgcaaactgtgtgctccctccagggatgacgttccccttcattggagacttcctagggacccccccacggtacagtgcggctagtgaaatccaaacacacgtcatgacctaatcacactggcaaaattaattaattatagccctggtttatgctttcatggtcaaaaccaattaattacatgtcccttttatattggtctgccatcccttccaaaacttaaatgaagtaggtacccaacaaacatttgaaataatattttaaatcagataactgacttcctgaaagctcttttgttatatgagaaaaagaagacatagtcccatggggttaactctgggatcatacatcaaataaagctacaccttcccccaccccaattggcttgataaggaactacttgggggaagtcagtccatcccctctgcctgcaggttactgtgaggggagctggcttcatgggggagtgcaggggcttcaaacgacctgagccaggtagtgaccaagaccccccaccccgcccagggtgcactggccatcttcgacgtgagtcacataacctcctccacagggcactccaggcctctgagcagctctccctcctcaccagtccgggctcctcacttctgcccctccctcccctccgtcctaatccagcagcctttctgcccaccaacatgcctcgaggctgtgctcattcctgcctttccctccttcaaagcatctcctccacagccgccccttccacgaccgctgctgcctcctacccattcccccacccagccattcctctcacccccctttccttccatggttcaccctcccacagtcctccaatgcccaaagtgcatctctgactgtggaggacaagtcagcctttggcagaagcgtggcagaaaagaagctggcacaactttgccccgagagacctggtgcccagacttgagccctgtctcaacagctgactgaggagcaccacgtgaactctggtatgctctcctcaggtgtgtgttctctacaaagtgagaaatgacgccatacagcagcggcttagagcccaccccctctcctgcccccaccctgcaaaagggacagacagaggcagggtggcagggtggctggccagtggccgaggcagggtgacgcagtccatgctgttctcgtacaccccagcgtcctcgtccaaaccggctgacaagctccctgggaaaggaggaggggccgctccctcgccccaactggagcagtgctgaggtcatgaccagagctggagtgagctgggtggagggacgctctgagtgggatgtggcatgaatccacaggcagagcctctaaacatatacctgtacaggaaaaaagaaaccaaatatttcttctcccttccaaggctcaactaaatgatcacgattttcagggaagaaaggaatctgagaatgttgtagccagatcctttgattttcagtccaagtcctcaggtaccacagttctgggccacttgcttcctagcctggggacaggtcccactattctgcttctcaggagatgtgtgccgttgcctatgtttaaatgtgtggccagaattcctgagatggtaatggcaacacttgagcccctcacctatgacagaagaaggccttctggatgggactgaggagggccagccatcctggttttcctgggactgagagctctcaggatacagggctttcagttttaaaatcaggacagttcccagctaagttgttcagtacaagatgcacagcctagcctgaactaaacttcccttctccttattaatattgatggggcaggaatgccacaatttgaaaggacacaggggatttgagggctgggaatgcaaaaaggatctatattctaagctccgtgatggttttctcacgtcctttttgcataaagaaagtgagtttcagaaaaatgtgctggcctagaagtcacctttaagtagcagagttaggtttgaaactcagatctgtgggatccctaaactcatgttgtttccctggccctatgagctctgtggaaccatcactaccttacagcccccaaacccagcatcataatacaaggcaaaggctgcctttgagaagatttagaaacatgcagggtcagcggagtttaaactcagctggtcaacaacccctccctcaccctctgtgttgtggccacagctcctccaagcccagctgtaaatcctgctagtctgtaaacagccaaacgcagctcctccattgcttagcagcttttgacactaattgctctacagagtgtgtgcaactggcaacaccttattaaaagtgaaatatatgatactgtccacttattgctgctttatagagataaagtattcttactacatggaaaagctggcaacaagtttgataaagtggtttctaaagagaagcctgcacgaggcaattcctgggacatgggatctatccgggtcaggctgggagctttcccagtttgacctaaagattttaccacaccaagaatccctccctttcgccactctgacttctatctcaaagatgagcctcttcaaagcctgggcactgaagaaaagacaaacatgactgctctcagagctgggaaagcagacctggccccatctgcagagtcaatccatcctcttcctcccgaggactaagcagggtgcagaggagatggacagccagaagtgtgggcagggaaggcgggaggaggaggaaaggcaagacaaggacaagagagctccagattcagacaagcacgggccaagacgggcttcctgaggaagactctactagccccaggtcccacattctcaaaggaaatcaaaatcagcactctgcggagacttgctgtatcctccaccatcagagaactcatctgccacctaacctcagggaagtcactatctggggctctgtaatgcaaggcagacctgtcctgaaaagaaactagattaagctcctcaatccaaatcccctaaaacactttcacggagaacccccaaatccaaggttgcctgacatctcatatggtttgcaagctaagaaatactttttgcatttttaagagttttgaaaagaagaagaatttgagatagagactggatgaggttcacaaagtctaaaatagtttctgtctgacccttcacaaaatacatttgctgaccctgtcttcaaggaaagaattagaaagccagagaaagaagactgcagacaggagcagaggaagcccctggcatgatggaaggacagagatggatacagaaatgccatcagtaaaagactgccccgcttccataacagacttttgtgagtgctgagatctgattaattgtgccaaccgcacctactggacagagccagccacgggagcccccagctttgttgcggcgatgtttttctgctgatcttcatccatgccagcattgagaagccgtcaaatgggactgggtggccccaggagctagcagataacaagggagatgaaatgacgaagagaggaaccattgtccctgctaggttttgtgtttctgagataccaaattgcctgatcgctttgacattttcaagaccaaattaaaatgcgccaccatggagacaaaatgtcattagcctcattataagtgattgtgttaaaataaatacaaaaataaagtgggaattagtccaaaccattaaaatacagaagcaaaaatggccaacagggactttacatgtgacagactaagaaaggttgagacaccccctaaggggacagggaagatgaatgtagcaggcacaggggctgagcagcaggctttcgggccatgcagaggtcagcactgaggcgatcgcaggctctccgggtgcctcacaccacatgaccttagggaaggaccctcgacctcatcaaaccccggaattccctctctaggaaaataggaacgtaacaccatctttttcaagtatctgttaatagtttcagtgcttattgggaagggattaagacctggccttttgagatggatactgtcttggagctggcactggagagaagggggccggaggcctcctgggcagggacaaggggacctcacagggccagctcctggttttcttcaaaaggtgagcctggctaccaggcagactctccatggggagaaagcccagggggaacacagaacccaggctgttctgacggctgagtctggctgaagctcagcacctgctcgggaacctcctaccaccaaatgcacctgtcttcctcctccctcaatctgcttcctcttctctgcttcactcctcctgacccttcactgtttctctcccccacaccatcttccactgacacctcagacttcatcccagaaacctggtctcagcctcacattttccatctactcagtttctctttgtcacccatagacattggcctccagtgcccctgtcttataatcgttaaccataaataagcaatgaggtgaactgatgcctcccaaaaggaagagaacaaagtttttctcttgcctccttagaaagaggacatgaattataactatcaccgcttccttcctctctgcctccatgaaggccacatgaagccttccctgctaggagtaatgactgaatatgcaagttctgtttccacactcccggccgaccttcctcatcagtcataggtttcttttccaaatgagctgaggactaggacctattggttagaagttcgcaccattttcttccccttgagattaaggattgtggttttcaccatgcacaaaataagcctctctaataagtatcaaccaacccagctggaagcacaatgttagaataataatgtcttacattagcaagatatttcttcctattttctaaatgtccctctccatcagtagcacctggacccacacattctgtagtgtgacaaaggtaggtattttcattccttcccaacgtttaaaataatggaggcccctggaaagaaagtgtcttgtcccaggtcccacagtaaagaggaactgaaagccacaggccttaaccctacattcagtcaaaattcttgaattactttttctgcattttaaagagtagaacaaagaactccccagagccctgagagggttacttccctagtgcctgcaaatggcttggcacataaaaagcacctccaaaatgctcaggggtaatgagcgcgggggctcagagggctttgctgacatgagctcactaatccccaaaagcttccagcacaatatgtggcaggagatggtctctccatctttgcctctgctcctctacctgctctggcgttgtgatccctcaggaaatctgtgaatggattagcaacactattttattattatttcaaataagcctgagacaaggatcctgggagaacagtgtgggaacactggccggcagaagaaacaatgaggtggctctaatcatccctgataaaatcagtggaagcagtggctgcaggaaacagtgcatggtattgtcctagccacataagcagaaaagtgttaccctggtaccccagacagaatggttactgtttaatcagcatacgccactgcccatgtgctgtcctggggcagaaggcaggagaacgcactcggtgcacgccttcaaagctggccctgtgcaggttcgggatggctgcctgcctctgcactagaccacagttttccatttgaatctgtggttcccacagtgcccccactcatccactttctttcttccaaacccaacaggcatctgactgctctgatatattttttatccctgcatgtgggtctttcccccacttcccattttcatcctgtgactgctgattttaaagtgtgtctatttctcccttgctccataaatgaggatcaaaacagagaagaccgttatccactgcccgctagcccagcctgagggcctgaggaccaagagaccctgtggactgggctaagtcttcgtgaagagggccccagcaaagcctgatactggactgagaagacacagcttcaaaggggagaactccagctcagcacctccctctgtggagcaggaggatgggacacagtgctgaaatgggtgcagccccaggctccaaggcagtgggctggctgcaatcaatccccattttcaaagtgctcattcgaactatgaaacatcagcgcaggcagcacctcagggggtcatctactgcagtcttcttttgtagagaggaaattggggctgagaaagtccagtggccacacagccagtgatgcttgcaagaacagagttgaggggagctgattcctagggctcctctcaccaggtcgtaagcactgactctgggaactagagatgattcctgtcctcaagttaactttctgattatggcgacaacaatgtaaagacagttgtagaagtggccactgagagaataaatccttaaaatctcaggctgggcacagtggctcacgcttgtaatcccagcactttgggaggccgaggcgggcggaccacctgaggtcaggagtgcaataccagcctggccaacatggtgaaaccccatatctactacaaaattacaaaagttagccaggcgtggtgacgggcccctgtaatcccagctacttgggaggctgaggcagaagaatcactttaacccgggaggcagaggttgcagtgagctgagatcacaccactgcactccagactgggtgacagagtgaaagtatgtctcaaaaaaaaaaaaaaaaatctcaaatgactcagagccaataatgcaagctgtaagatcgttttccccaacactagatattaggattaccagggaagcttttcaaaaatattaatatctgatttcctacccggatcaactacatcagaattcagggaagcagggcctgagtgtcgtggttgtttgtaagcttccccaggttgtcctgatatgcagcccaggttgagagccattgctctgggaggtagcagagaaagagtttttactgtgtacagtggccaggaaaggctacttggaagaaaatgtgcttgggctgggtttgggtacaaatcagaggaaggttataggcctgggtgcagcccaggattcttcatttccatactgctggtctaggaaccacattttgagtgaaaagactaaggacaagaaccactggatgtcaatgtcttctttctctgagcctttatttgcactttctatgtaatgatccagggtggtttctgccctcagtttcccaaatggagcaagttaggcagttttagtgagggccccatgcccttgaagagggacctctgcaagctcagcagccatggccctggctgacctgcctccacactgcaagtccagcccacaggaatcatctgggctgccgcaggcaatgctccctctggcctcataaggaactggcccgagcctcccaatcacttggaggagtgggaagaatgcaagtaattgtgaaaggatctgccaaacgtcttctgccccgtgactttacaccacagatcacatctgcctgtgtcagcagccttgtccctccacgccggatgcagctgggtgcgcaccaaacagcaaggaaagcgctgaaaacgactcgagtcaagaatgaacacttgctgtgcctcacctcttgctcggcttgccccagcaccttccagacaagaggacgggacagagcgacagggcctgtgcttcccaacgtgccactcctaacttatgctcaaccctttctctttttttgatatatataagttcgtttttttttttaaatttaaattactaccatttattgagtgcctatgtgtcaggcacagtgctgaagcactgtattaatctccacagcaatctttttaaattttatgttctgggatacatgtgcaggacgtgcaggtttgttacattggtaaacgtgtatcatggtggtttgctgcacctatcaatccatcacctaggtattaaggcccggatgcattagctatttatcctgatgctctccctcaacccccgtcccactgacaggccccattctgtgatgttcgcctccctgtgtccatatgttctcattattcagcttccacttgtaagtgagaacatgtggtgtttggttttctgttccagtgttagtttgctgaggataatggcttccagcttcttccatattcctgcaaaggacatgatctcattccacttcgtggctacatagtattccacggggtatatgtatcacattttctttatccactctatcattgatgggcatttgggtttattccatgtctttgctagtaagctcagcccttctgcaacttggcggtggtggcaatgctgttccatactcactctgagattgtcttgaaaatcctctcacacttcctatgacaactctcaatcaaccttctcccacagttctaagtcgggagctccaatctcatttctgggcagaaacactaagttccagagaggttaaccaagctgcccgaggtcatacgggttgttagaaggcattggcttctctcctctctagctaacctgcttaggtagctgtttctgttaggtggatcactcatttactctatgagtactcactgagtaccctttctatgtaagtctccatttactccacgagttctcattgattactcttcctttgtgaggcaccacctctggggtgtctcttcttaaaggctttgggggtcctacctcatgcccacatccactcccctcaccaggcacattaccctaaccttggtggtgctctgactactggaaaagtagtgaggccatgtggggaagtctttaagtggagagttctgctacaggcttgcttaccatctgacactcctaacactgcaggtgtgcgtctctacagtcacccagcctgttctgagctggccctggtagggagtgcacttcctgacacacaagtttgagcagccaatgagcagtgcccaggctgcccctggaccacccaggaggccccttgattcaagtctcgccatcacaggctgagaagagctgctatcagattttcagaataccatttcttttgtatgctacagagtaaacttcctgcaagatggaagagggtataggggaaagtgcactgcccagaagtaattagagctcatttctgtacctgattctgccacaagttgctgtgtgagcctgattaaatcagtttacttccacaccccaagccttctcatttgtgattcaagctgtttgtcttaaatggtcttaaggttccttatgatgcaaatcgtttgtgggcatagaattagcttccccctctcttgggcttttcttcatgccccagcactaaatacttaagggactgatataaatggaatctgtactttaatagcactgcctttgttcctttaattgtgtcctgcagtgatttaggatagcatgtggtcaagacctttgtgccaacataaagcctgcaagccaagcaaggttgttaccttgacccatttactacctgacctacacgttaccatggatgaactcgtcatgcctccatgtaatcatctccctcacctcttttagttgaagttccccagagctgcatgttggactctcttctcttccctttctgcattcctcttctggtgatcacatgcagctttgcagctttacatgtcattgatatgccagccacatacacacacacacacacgcacacacacacacacacactccaatctcattacaaatccaactgcctactcaacatgccccatagccatttcaagttcaacacatccaaaggaaactcctgatccctccctaaagccctgttccaccaatagaactccattgcgattggtgtcaactttatccttccaattgtacggatcaaagaatttggagtcctccgtgaatccactctctctcacctgattctgccatcccggtggccctgccttcagctacagccataatcttccactatcatttcctctgcaatctccctgttccaagctaccttcatctgcttggactggggcagtatcttcctaactggtctctgcctctaagctttagcaaccagaatgttcttttaaacaaagcgagtcctgctactcctctgctaaaaatctgaatgagctcctcatctaactcagaataaaagccgaacttcttacacaggaccgcgtggctaactgggtaccccaataagctcccttatcctttaaaaacctctctgcccacatctactactctcttcccacttgcttactctgcttgagcctcacttgcctcttgactgttgcttgaataagccaggcagattcactcatgccctgaggtcttgcaccagccagtccttctgcctggaatgccctttccaaactcctttacccctttcacatctctgcccaagtgtggcctccttcagtgaggtctggccagactggcctgtttgtaattgcgactctcttccccataatcccattctccatagcctgatgtactttttttttttgcttttttccatatttcttcagttgttctaacatactataaaatttatctacatgctatgtttgttgtgtattataagattttctccactagtatgtaagcttcctaagggcagaactcttagtctgttttatttgctgttgcaccccaaagtcctagaacagtgcttgacccatgccaggtagttactcttcatttgttgaatgaatgagttaaagagcaatggccatgtctgaaaagatagggacaaaagaatctctttttcctactctcacagagtcactcaacacacttttgacaccagatgttgtggggttgggggttcctcgcacactaagcaattttctgatgaacaccagctgggtgttccaagagcatcagatcctgcaggttaagagcttggttccataagactactccacttcagaggccattagaaagctccaggttgtgatctgtgtttctgaccaaccagcaacaaatcaggatttgtcccaaacctacttacctgtgtttgattagcgttctagattcccacacctaccacccagtctttgattgatttactagagcggctcacaaaactcagggaaacactttgcttacattttacccacttgttataaaacacgttacaaaggctacagatgaacagccagatggaaggaatgaatggagtaaggtatggggaagaggtacagcctcggcaccatcctccaggcatctccatgtcttcaacaatccagaagctctctgaatcctgtcctttggctttttaatggaagctttcttacataggcatgactgattacattattagccactggtgattagctcaaccttcagtccctctcccctattcccaaatctcaggggaacaactggaagtcccaaccttccaatcacatgtttggttcccctggcaacaagatcacatcatgagtccatccaggagcctaccaaagagttgcctcattgggacaaaaaggtgttcctatcctccaggatattctgaggtatttaggatctctgtcagactagcctatcactcaggaaattaggaaggtcttaggagttccatgtcagaaaccagagccaaagaccaaatatcagaacagaagattctcctaggatccctatctacaaggatattagcagctttgtcccaggaaccagggcagagaccaatatatatttcttattatatcacaatatcacaccatgtaaacccattttcaagaagtcaatgagcaactaaatatgcctttatcctgaaatttgagcacactctacaattaaaacaaacctttcaaggcataaagctgaatttcttcttattggacctgctgtctggaatttataaacctagaggtagcaattctccctgggagtaaacacaacagaagaatatgaagagagatgcaccatgcctctgataatgtgagaagccccaaacatttaaaaaaaaaatggtttctcacacctttgactctatttataacatggacattgagaaatgtgtggggttattaaaagttcagatttcaccagccccattcgtaatttttctgacatttaaatgacacaaaccaaatcttcagcacgacaagagtgttactgcttagatcacagagcactgccacttttctcaacactgcaatttggaggttggcttggattactcctttcttccactgctttaccccctgtctcctgtttcccagccaatccccaaacatcagtgcatgtggttaatgcaattctcatcctttaaaaacccaactcaaatgtcatctcatctgggaagcctccttcatgaaacctggcagagctagtttcttccttccttgcgcttccataggattgtttatgcaaaagactgcagaggcagtacattgtgttttgttaacgtgtttacagaattgtgtctccctgagtgaagcactcaaggagagtggccttgtcttagacatctcgccatcctgagcctctagtgcctggtagaaagtgagtgcataactgatacctgttgcataatgaccttgtagaattagttgttgcctatggagctttgcaaggaagtagcttttatctaaactaaatttggcatttataatggttcatgaaaagatcttaattcatgagctgcattacagagattaagagtttagcatctaaaattgttgttgtcaggaacacagcagcaaagaaatcgagccagcaaggtcagttgaatacaggaaaaaaatcatgattcagtatcccaaagggtcagtccctacacaccaagcccctctagggctgtggagaagtctgccacagagaattggagagcaaattatgcaagataaagagacacttcaaggctggtcacgaaacgaaaacaaagacaccccaaaactgtggcaatggttcacatcgcctggcatctgcaagaccttggagctacagcattgtcagtgtttgcagtagggatcatgagaggctttgatgcaatgaggaaccagtacaggggatactggtcacataaccttcacacatgccttctgcagtgattgtgtgcaagggaggcgagttggctgctccctagttttggagctttggagacactgacctctggaatgtgggcttgattctttagctcctaagtctctcccaaaagggactgaagagagagggaaaaaccaaacactcttatttcctgtttgccagctccatgtcagcttcccatgtgtgctcccttcctcctcgtctggagtgcttggcatctgccgttacttaaatcattgcagggagatacagggtactctgaatgtcctgccaacgacccctttaggttagaagtaacctaaagactaaagtcaagagtccttttttaaatatttaggacaattctcacttttttatggtaggagactcctttcttttcaaattggctcagtactcttaattgatctcaaaactctattgccataactgtacgtaggtctgcactgttatttataacccactgattttaaatactgccttttagtttagctttatgtttttgtctataggaaatttgtctgagctgtcactctcactcctgtgtaccctcaagatagtagactaaaatattgaagtctaccctaagaaagttgctggaaccatttgcctggtaaaaatcacatgctcattgagagagtcagtccagctaaattaataatgcagctatggtgcaagccttctcatatctaatttattccagatataccactctagaacaaccctactattatacccaatagtgttactatcaaatatgttcatcttattagccatccctaaaaagtattcattaaagagcatctggaaaagaagaaaaatttgatgacttgattcacaggttctggataaactgaatttccaggaaaacagataagctgagaaccagaagctcctcacagacttgaaccagagcaggtcagaggtgcagtcctgtaatacaagaagagaaggccatcttccaccagctgggaggaaggcaactctcttcagctagaggggttgctaggatactgcactgaccatttaaaatcacagagcagtggttctcaaccagaaatgattttgctccccagggggcatttggctgtgtctagagacatcttgggctgtcacagctcaaaaggtgccactggcatctggtggctggaggccagggatgttgctaaacatcatacaatgcacaggaaattcacataacaaagaactattgtgcctaaaacgtcaagagtgccggggttgaaaagccatgccatagggataatagaaaaatcaagttcgagaagctaatacaaaaccataacaatcaagaacaggaacagtactgaagggtggaccagctttatgagccaaacagtgactacgccccagataaccaaccaggaatatgagaaatacacagaagatggattgtaatgggcttggggtgcatcaagagggaaaggaagtacctttaccaccagtccagaaaagcccgaaactcaagttagaaatttggggaaacatgtcaaaaaatgtttaatttcctcaagggtcaaggcagggtctccaagggctggggctcctggattctgccaagaagaggaaaaaaaaaaaaaaagtttctactgatcttaaagatttcccagtcctcacagcgccatgagtgagtcctagttcaacttcgcagagtgagcagttgagcaaataacagaccagaaactgataaatggagtctggcgctggctcccatgcctgctcaacacaacgccagcctcatcctccaacaaccagaagtaaggacaggtctacgtgtgcagggcgcttatcgggagaaacaactgggagagaagctgggcaggagccatgagatctgggagagcttggggactgcgacccccgcagagggagagcaaggctggcagctggtgggtggaggcagacagcacagtgcagctctggggaaggctctgaggtacctggagaggcttcgtgtcagtctccatcagaggagacgcatctcccaccagcagacctgacttgatatctccactgcgttctgttatggccagatagtggctgagagaacgcgaccttggagccgtcacagccaggggcttcggagagccacatccgaggcttctagtcagtcacacttcccatagccaaagatctggggggacacactcacaccaccgccgccggggctggggctggactccagtcacttcaggacaaaaactatgctaaggagaggcatccactcccagtttttccgagttttgctcttttctgtgtatctccatgaatgagttttaataatacctcttttgaaaaattccaactctaccttagctgaatttctcctcaggggcaagggtgctttccagcctaaaccaggaaagctaaggcctcagtgtccccagggtagatggtccctggtgcagagccggtgcagagccgggacagagcgggagaaggcggagaaccctggagatggagagttacgagccacggggatggatggtccctgtccttggccttttcttctcgcaaagactgtttgcattgatttcccttcagtggtcttttttattttttatataaacaacagaatattctggatgcaggtctgtattcactgatgtgttactcatttttaccacaaaggtagcattgttgaagaacactacagctgccacaagatggggtcttccgtagcaacggcattgtacccacatccagagtgagctgtggccaaggacacatccccacgcgaagtcccagagggaggcagtcagagccaagccattagacgcatcttgccaagaatgatttgacatttctgtctggactccattcccagtcacgtggcacgactctctgcaatggtctccaaagaggtgcttgtcctcaagggtcctctgagtgatacacggatgtgaaaggaaggaatatcagaattcctacttttatctatttttatcttactctttttatcattatatataagaaaaaatatgtgtagtgattatatatttctatacatgtgtagtagtaacctatatacatcatttatacatgcataaatatatattgcatgtgcatgcctaaaatggtttttgtaaaaaccacaggagctcataaacaagaatttgggagcccactgatagtacagcgggtcttaattttttaatagtggaaagtgatcgtgtactgctagtgtaataaaagcggaattcctctggttgataaagggcaacagggagtcagggagtgggggcaactcccccatacttaccgctagggcggtgggggtttggactgtacagacagaaacccaggcatcaggacaaggagctgtgggaagctatctgagaggcatcatctcaggggacagaaaactaattggagccaggctgactcctgggcaaagccatcggtgccagggtccaagcagcagtgagcagcgccaggccacagagctgaatggagggacacatctcagcaagaacaaggtgtttctgaagaagggaggtgagaactggaggagttttctgagccagagtgagtgaatgagtaaccacagccgctctttcagggggtactcgtgaccactgtgtgtgcagagtgggaacagtcaaggctgtgcaccttgctgagcaccaggcacagaatgggcaaggaggatgactggggtcctaaatttctccatttctgacacccaggaagcagtctctttctctagcactgccagttccgaggaggagtcccatggcacttctgcctctcatattacagagagacagcctccaaaagacccctcataagcaaaaaaaggttcacgagaggagtgtggtgtgcatatgtatgtgtggtgtgtgtggagaagagtgtgcatgtgtcacgtgtatgggtggtgtgtgtggatataggcaaggtatgtatgtgtgtaatgtgtatggaagcgtgtataagtgtgtgggggggtgtgtttgtgctcatatgggtgggtggtgtgcaggcatggtgtgtggatataagcaaagtatgtatgtgtgtaatgtgtatggaagcgtgtataagtgtgtgtgtgtgggtgtgtttgtgctcatatgggtgggtggtgtgcaggcatggtgtgtgtaaataagtgtgtgtgtgcatagggatgtgcatggatgggtttgtgtgtaagtgtgggcaggtatgggtatttgtgtgtataagtgtgtgcatggatgtttgtgtataagtgtgtgcgggtgtgggtgtgtatgcaagtgtgtgtgagtgtgtgcatataaatttgcatgcacaagtgtgtgtgtgcctatggctgggcagtgtgcaggtgctggtgtgtgtggggctgtggcgtgggcagtggcaggtgctggtgtgtgtggggctgtggcgtgggcagtggcaggtgctggtgtgtgtggggctgtggcgtgggcagtggcaggtgctggtgtgtgtggggctgtggcgtggacagtggcaggtcctggtgtgttgggggctgggctgtgaacagtggcaggtcctggtgtgttgggggctgggctgtgaacagtggcaggttggaagatctgtggcagccactgtccatgcagagatgccctgtgcccgccccctagggttctgccatgtctgattgctgcaacttgccctctggtatgtcaggccaggagcagcccacagaggtgcttgccctgtgggtgacagtccctgaaagcctctctcctcctcttcaacacgggaggtcctcggccctgcacaggaacatcctgagggctcaggattccttctccctggtgcactgtgagctcccgttgcggggtggctgactcatcttctgcctccgtctctgtcccagcagaaccttgtgctgggtggtctgggcttcacctttgcccttccttgtctctggcttccagatattcctagtcccactttcttcctaactttctgcctagttctaaccttggctttctggcttccctctgccacctaccaccaaatgttcaatgcaatacaaaagaggagacttcaggaaattctgaaagcataattaacatatttttatgcattaatttatttgtgaaaaataaagtccagccatagacctaaatgtgagatctgttgatggtgaagcaagtcctacagcatctgggagagacacaacagaaggacgagggaaactttactgaaaaatctgtcacagtcactctgttcccagatgtcaccaccaaaatatagctaaaaaataatcatgaacagttgaaaataaaggagaatcaagattataagatgcttttaccaggggaaaaaaagctataatgcatcttccttgatttctcccatctcccctatcttcctgaactctcttgtgtttctgctcttcagccacagcataaaatatgaccttgataacaaacaaacctcttgccctcccaggcacacatgctgcaatggtgcttctggaatactgactgagtaaaagtgtcaatggcttctcccgcacctctaatctacaggcacgtgtgcctgccagacaaacctgacttcaaccagccaagcttagctgtgtctaattgccttctaaagtagcatccactgtttctatgaaatttgaccacatcaacatagcttctgctgcatgtgagacagacctggggctgggtgctgagcagctcacaaccaaagctagacggtgccaccttacgtctctgagagtctgcccatacaaagtgaggctcagagacctttatgaatattaagacataatgaagaatgaattttctagtcccaaaggagggttagagcagctctccaccccaccccaggcaagacaaagactcaatgtgtgggtaagttacaaagagctcccctgtcctccagagacccagtttatgctgaagtcctgcggacttttgctgcccagaagacagcctggtaacacagacagaaggactcttcccaagtgcagtgtgcgtgggaggttcctggtctcaagggccattttcagaactacaggccacctcactatccctgctcaagctgggtctttttctgaggctcccaagaagctgagcctgctggattagggcagagtacaagatgggtatatgactgattccagaaaggcagcccctttctcccacgcaagcagaaaaacaatggtgctaaatcagtggtgctcattctggacttagcccagcatgggtgcaaggctttgtggggacacgagatgatgttgtagtttccccttgggcctgggcaaagacgaatctaacctctagggatgcattcatcagcccatgtgtagagaaatcagtcaggcccctttctaaaacatgttcagtagtgtcaaagaggacccctctttccacaaaagaatattctgcagccaaacaccattcccggaagttctacttttagtagtgactgcaactgtaagaggcaggcattatcagccaggcctggtcttcacggagccagagagcacttttagcttcacttgaggctccgtgttggagctctttctgaacccgtttcaggtctctcatcacaacccaaatggcaaagtccacgttctctggcagggctcagctggggaaagataagccacttcccagtgttctccatgggaaaaaagaggcaaaccaaacattgactcatgcctgggaagtgaatgcaggagttccctggataggcctcctgctccaaaacaagagtcacagactctttggcatgcactccactgctagttatcatcacaagccgtcctagccagagagagaggaagtcacagaaaatggagagagaaatgcccagacaagggtcgccttccgaagcaaggcaaggagacctggcaacctggaactgcacagcacttcggaaggggtgtgtccatcgggctcctctcctgacctttgggtccacttgcgaattaggcaaaacagttcttttggattttacagagagaattacaggtattcaatacattaaactgcttgcccaagatcacttggctcataagctgtgaggcaaagtcagaggcaaagtcaggggccacatcctgggtcaggaagtcagtgcttccttccacacggtgaaggcaggatagctaattgtttgctttaaaaataagtaatttcagtgaaagaagaaaagaaacagtcatctgggccataagaaagaagtgacccaatcttcatggacattgtgggctaaactgatggcagttataaggtagtatccattgactctcaagaattcgcaccaaacaaaaggagggtggggcccaccagaaaaacatgcaaaatcctgatagtggttttcatgattccttcccatctgggcttcacccaaagaggcatccatcccagtgccaagtaagactgggcactctctcctccatgggataaagccaggggactcccaaggaaactgcagcttctcttggagcctgtaagctgatgggctatttccatctgccacattctctcttccaacatcctcctctctttgaggggtatgggaaatcccttggcactgggatgttcaggagaaccaggttagcttattcggagaagccaaaggcttctgtaggcctttcttcctagaatggaaattctcataggggcttggcctccccactgtcctgtttcggcctgctaccatctgaccatatctggcatggttttgagtctgaactctggcttcctgttctacatttgtctacagctcttttggacctattgttttgattgcacccatgtctatgttgtcaactgtgaaggcagtgtggtggtattaggagtggggaggtaagaagacctagtgcatttggctctttcccttagtagcacacaaaatagtcatgccgtacatgtatgtgatttgtacactctaagccaccatttaacatgaatcattaatgtagagactgtgggattctcagtatagattttctcttggcttagtgcagagccaagcccaaacagatatttaaaaatagatgttttgatagtgtagtgatgataaaatcaggtacctgtcatggtgcgtagaccaaacaagtcaagttgacacgtatctggcatttggtattgtactaccctgaacatattcttctgcatatcaaggagcaaagtatttctggaagtctcccagatcattacaaaggtcattcgaagtatgcaaatgccactgaaggagacagggcttctgtttgtttgtttttgacctagattctgatctttgggtaagagggagcttggagctaccttgttccacaatgttctttgtacactaaggtgagagagcttcaagggaacacagtaatggtcaaggttataggtccgttttccagcagcgtaacagattgggaggcaaagttcagtccagcccttcactatgatttgatatgacacgcgacaggtgacgagaagagctgtattcaagagggggctcagtcactatctgactatgtgacttcaggtaagacactcagatgccctttgcccgagtgcttcatctataaaatgaaagcactcaactagacaatttccaaggtcccttttgattccaaggacctttcactttttaaataaattactgcaatttaaaaaatgtttgtagggagccagccatagatgccactctctgctcagaggggtctaggcggtgggccatgtggaggtcatacatgctttgcatcgtgataatatttgtgaactagttgcatcttggtggccacaagctactatggcgtccaattagcgcttttctaaaatgcctgatttcttccaggaggaaacaaccacagacagaatccagaagacaaaacacaactagggctttttgtaatatttttgaagggtagagaaaccgagttattcaattttaagccctacattagacccagagagggcaccagttaagagattgagattattagaccgccaagaagtatgggatttctaaaaacaacctattccttgttccaggacaagatcacacctaaactgaaagagatagcatacaagcaggaacctgaggacggacgctcttctcagcactctcccaggagtgttggtgctgacagtggggagacttagatttcagttctgcagattctgactcccacctacaactttcctttaaaagttcccaagtgcattcgtgtctccattccaaccaatatttcctaagttccaaggcacagccatctcctgcctgaactactacagtagtcttccgactagtctatcccttcctggtttgttctctcccaatctattctgccaactgcaacaagaacaagaataaaaaatgtaaatcatgaatcacatcaacagagttccattatttctaggataaagaccaaaatgattcacatgaccttcaagggctgtcttcatcttctgaccccttaccaggctgccagcctcatcttggcccatgctttcttcctctacactccagtcaggtgggagaatgtgctctgattcttcatgctatgggactttgcccgtcctgttcattctgcctcttcctttggtctttgctcttgggtgtggataatttctactcctcctccttcaaatctctgttcaattgtcactttcataaccaaggcttcaccagcctccctggcaagatcaagctctcctgacagacaatcacagcaccacacacctccccttccatagtttcatgtcggtcatgatttcacaactgtctgggtgtttgtttgacgcatgtctgtctctccctctggactgtaagcttcatgagagcaggaaccataacaatttctgttcaggcatacattcccaatgcctagcatagtatttgtcacatagtaatcactcaataaatcacatgttgaataaataaatgtgcttggtactgtagagtattcagagatgaataagtcaggatgtccgccattcagaatcccacagccatacaacagcaagaccgtgaaataggccagactgcgataagtgagtaggtgcaagaagtgatacagcacccttttttatatcctgtgatttgctaagctgctttttaccttttccatatgaacatcaacccgtttaagcattgattgaccattcatgaccttctgctatgcaattgcatttttgtatctctaacccaacattgcacttcctatgaacaacagaattctccttttgattggtacagtttttgcttgttagcaccatgggcctgactctaaatttcaaataactggggccatttcagcagacaccctgattaaacgtgctgagtaattttagtttgtattaaaccaatagcccacattagggcccacatctgtgtttacggaacgactcacactctcaggcgtgtctgtcgcagtgtgcgatgtgagatccaaaagtgtgctgctccagctctgtgctgctgcatgtgtgtttggtcggtagctcagagctggtgtttattgacaagcaagaacactggaatgagtaatcattataagcattccctgcacattcccgtctctcagaagcaaggcacatccccaagcttcttgccctcattctgcaggggacaagctgctgggcaggccaaactgggggcctcaatgcctttgaggactcagtgggatggaacagaatgattgcctaaagtaagtgagcactcagtgtttatttattcattcattcattctctcattcatttgttcaacaaatactgtttgagcacttgctctctcccacccgtgctaggcactgagaacatattggagaacaaaacaggtgtggtctctgcctgtataaacaatggtctagggaggaaagagagacataaaaccaagaattagtttgaaatacatggactcacagttttagaaaagagaagtctggttccgaggacttgcacaataaacagggaagcctcgcctactttgaagcataaagaatgagctcctgggaaagcagcatttaagctgagttctgaaggatggaaaggatgtgtagccagaaaaaattataagaggatcagaattttccaagctcaggtaacctgacaggtgaagcccttgaggaaggagggaacaggccttgtctacggaactgtgattgtccagagtgactaaagtccagagctggaaaggcagagagctggagatgaagctagatgaatgcagggccagatcatggccttgtgggtcatttgaagtgtttcgaagtctattctaaagtcaaccggaagtctacatagggttttaggcaacgcgaagatcagatcacaatagggtgacatctacactgcctacctcacagtctcttagtgaggaacaaatgagaccaaagataagtttttccaggtgatccataaggaatgagaccactgtgtttctaaaaccgttagtaactcccaagtgtggtaaaacaccatttgtaaattccccaggaataaaggttccagaatgaccgctcaggccacttgagagactctgccccttgaagtgccagatagcctggttttctccacgttggagttcactgtgcaatctgattgtcacttatcgtttcccatgctaagtgcaaggagccattccaatcaacggcctgtgtcccactgcatcaattcatcttggcctttccgggggtctctcagcacagcatctccgctcattaacgagaatgcgcctgcatcataatgataatcctttgcacttacccagcacattgcccagggggttctcaaagcattttgtaaacttttaattaagttaggctagtgactgcaggatggtccccagcctctccgaaccaagaggtctggggtgggggtggcgacaggacgtgatgggagacaagcaaaagccctgcctctagcacctacttactggctctggggcgcagaggcgagtgggtggatgtgcagggaatctctgcgttgctaggaagaagcactcacacatgtatggccgtgtctggcacaggcagcctgtgggcctcctgccatgtgtgcccacagggagagcaccaaggctgggggctagagttgggagttctggaaaggcagatatagaaggcaagagggaagacttgctttccttaaagagctgtgaatgtgattttgagagtagctaaactctggcttggaaatgcatgtgtgccttgcgtgtatatgtgtgcaggaaggggcatgcatctatggttggcaagggggtggtgaagaagagaggagggaatgtatgttcacatgcttagaggaaggcagtagcaagcacattcatcttcaagcttctctctggttttggatttcttttggctcccttctcagggctacctttaatccttccctgagccatacaaataccaccatcttggggtatcaagtgagtggtgtataaatccagcaagtggaactacatccatgccctactgtgttagaaccatccccacccctcagggaaaatgcagaggcaaccaaggctttgcagataagtagcaagttgtaagtctgggtctcccaccaacagcataaaaggcaagagggacaaatgtcctcaggacctagccctgcactgaggactgggatcagaaggagtgggagagcagagccgccccaaggtgaagccacctgcctggccctctctgtctggaaagtgccagtcggtatcagaggtgctaacatccactgctcctgacagcctggcttgtcagcagccacagaccatctgggggctgacacttgagctcactgacaggaatcacagtttgcttccatatctctctgtctccagccccaggcagctgcaggcagatggcaacagtccatctgcaaacagggctgcaggctgatggggtccctgtccagcggaccagcatcagaaaagccagtgcccataggccaaaggctattagatggggctcctggagttccagctgtccaaggctgacatacaagtccatgtatctagcaccccaccaaatataccacaaagcaacgttttgagagaccaaaggtgccatgtctgttgccttagttttctacagcagaaaaactaagacctaaaagctcaaagtcagaatgcatattttattgggggtcaaaaagaagaaaaagcttaacaatttcctgttttactcgattaatgatttttgaggcaggagaatatcttaatacattgtttaatcagaacgtatataaagtcttgttcaataaatgaaggagtagattgtcttttactaattttcatcactgtgacaaagacatacatatatggtcagtatgattctaccttatcttctcccatttttaacaatatggaatgtcctctccccttctccaacatgcgagttgccttctctctttaccctattcctagaggaccaggatgagtttttttataataaaaatttagaagtgtttatttgttatcatctaacctaggtgttcagctactctgtgcagttggaaacaaggttcatacatggctggaacccattctacagattggtaaactgagacttagagaatgccttgaaccaaccaaataagcctcaaagagccactaatcaaagagatcactctcagctttcagcatacttagaggtttgggtggagtcccacttaaagggaagtgcactcagccccaggcagccctgacacagatttgaggctgtaaccaccagagatagttcccagtagctggcatgggagacccaggcccagagctgctagacaacaaatgcaggcaagtgccagctgtctaaagaatctccttctgtaattttctaggttacagagatgtggccaagggtgctaagaattcgagaaagcacaaaggcagacaggaccgagggaacatgggagaacctcaagcccgtcgggatctctgattaatctcaggttgagtagtgctgcccagttccaggctactgaaaaagccatcttcatgaggcagctgatgctatctccttctcagcacctgctattgccactgggcccatgctgaatgcagatgacgcagtctaaccttattaacatgtcgatcatttttaagggattgagggccacatgatggcgtgaatccatgatgggctaaaggacgatgggaacttgctcatgaccagatgctctgtccttgttcctatctctttcttagtgagtctggcgcgtggattcccccactagaccccttgtgcacatcaggcactcttagcaggttcgccggctctgggctggtgagaggctaaggagcaggaaaggaattcatcaaaacttggctgtagagcctgcccccaggccttaccccaaagccaaacatcccagcccagaaactcaagatttggggacttccctgaaggaagaagcaggaaggtgtgtgctagagaaggaagaatcctaaacctcgggggattttctatccaagcccagggttttctgaccctaaacgggcaaagcctgtttaaggtgcaagagatgaagttgtacccagaacctggactcacagatcagcgcatgaagacacagctcaatccaggttgggtaaatggggacccctcccagctaactcccctgcttagagtcacaagacgaaggagatacaaacaggatgggccaagaagaaggggacaaacaggaagtcatggtctgaatttgagcaaagaagtcttccaagttagcaatccttgcatcatggtgctggcccctggaaggacttgggcagcactgtgcctcaggaactgagccttggctgctggcaatgacaacatcttcttgcccttactccaccctgccccatggccacagagccatttctcaaagctggaggagaaaagacaagaagaagacaggttttgactcaaatactcaaatactcaaatactgtaggccatggtcacaggttttaagtgacagacagagtggtttgcaggtaatcagaaggacctgggatgctagttcaaaatgcttccgtctgagacgaggacagggactccacattttaacctgcctctctcctcctaggtgattctgatgcacatatctagcagtattcgcttcctgcttcctacagagcccccagacccaaggtcaagaaggccaccagcccagactatctctctcctcctactagaacaacaaaattaccccaaccaggggtgtccagagcctcggactgtgcctctagcatgacaagtcagttggccacgggccctctgccctgtcttgggtgtgggctcatctcagtctccacgtggtgactgtcttttccatcccagaaattctgcctagaaaagctatttgtgatatcagtggaaggtaccaggcgacaacagcattaaccttaaaattactctgggatggatacatgttttaccaagaaatagaagctgcagaataaaatggcattgaggcctaaccaggtcaaggttccattattacatcagcctttggtttttagacgcagtgaaagtaagtggctaacgagctggtattaatccctgtgggagaaaaagcatcatcatttgaaacaaagaaaaaaaagtctaaagctataacaggaagtaaaagaaaagagaaaggagaagtcgcaagtaagccatggcagctcatcagaacttccggatccagccaggtttcccacaggaacccctcaagatgcgaagcgttctttcaccgacaccttctaaggctaactttttctcctccccgttcttgttcttaccgggctcctgacacaattagcataagagtagccctcaaagcaggtaacagactcttcagaaagagggcatgttgcagtgatgtccacaccctgctctcccccagaagatgggggcaggggggtgggggggatagcttgtcattgtcgttcatccaccatgctcaggacggtcaggcaggggtgcaggttcatcctcctttccctcagccggctttagtttcgggtacttctcctgcaagcaagttctgcctgctccccaccagtgcagtgccacgggacccctagaaggaggtctcaccctggctcctggctccttcagggcgcgctgcaatgcagcttctgcagactggggctcaccccccgccttgctttctaaagtgtaatgttatgatttctgccataaggggcgcatccatacagccaggattcccttgggatgggggtcctgatctttgctccagcacagtgagaggaggggaagcgggtatgaggaggccccccggagctgccatccagctggggacttgcctacgcaggaaagtttgtcttctcctgccacggacccagtgcacccacctagctccctctaccaggctcaggcaggtactgagtgttccgttggctctgccttccctgctgagcacagcccccaggctggaccccctaggatgctgctggaatctggaataacaacaacagcaacccccactctgaacttcttggtcagcctaaaacaaacagctgggaacatggttatgcagagcccatccctgctttaaaaagtgccatcttcacaaggtgttacaaaacattacaggctggattacttgttttagttgatcctctcttctttctccccagtaaacttccatttttctgatttcactttggcatcttaggactactcagggaattatattattaaaaacaacactgaaaatattcccacaaaaccctaccaagtaatactgaatatagaaacataaaactgtatgttttacctataaaaaggcaggtaaggttttaaaatcttagcattcctgtctgtgtatatatgtatgaaaatttaggtttaagctaatgtttaacacaatgcatttatctcaatttgggggaaaaaaagagatcctgactgtgcgacggtttggtatgaaaaccgacacttttgctgctgcctaaaaccttggcaagcataacctagccccttcggcattgtttgaaagatgcctgcaggcattcagttgtctgcttgcaaaggactcctgtgcaattatcaaatctattaagatgccttcaattttgcaacgcttctgctaagctcattttggtaggattgcagcatcttacctgtgtcactgcagatttgttttccccaaacaaataactgctgtgagaggtgggatcacatttaaatcattagacaaggtggggaaggggctggggagaatcaggcaaatccaaatttccaaccttccctcagcagggacatcccaaattctgccaagggaaattcatattcctgacgtaaggaacaggaaggagatactgagaggattccgaatttcaagggcataatctgcccatttggtggaaggataaagaaaggacggcaggcagtagagggcctgtgttacaacaagaaatgcaggagcagatgagtgagctgagaaggagggatggggcagggaaggagctccagggggagagggtaggggagagcagttccgaaggaagggagggaggaggagagtggggagaggtggagagggagagagagagagagagagagagagagaaaagaaacagagagagagacagggaggcgcagagatctggactgattcagaaacagagagagaccaccacgactgagagagataagagggtgccccttccaccctgcaggtcccaacataggcagcaagaaggatttatggctgggagttcaaacccctcttctcctacccccaggaccacagctggttaatgccagttggtgactttcactgaaacagcagtgcctcacagcatggtgcagatctcgaacccagctcactggatcccccggaacagagagcaaatcccgtgctgaaagcatctgcgcgcgtgtgagcgagtgagtgtgtgtgtgcgtgcacacagcaagcctacctctttcactcacatgcatctcacactccctgtcctcaccccttcctccttgcctctccatctccccactgcctctcctgctctcacgtcgtacaatcaccccagggagagaaaacacccttcccctgtacggtacctgggatgaagagcagggcagttgtcgccgagaagacgacccagtaggcaggatggtacatctcgacgctgcggtgctctcagctgccgggcttgctactgcttctgctgctgctaccgctgctgccttcctctgtgctgaattctgagcaggtttaaatccaatgtttgcaaagggagggagagagcagaagagagagagagcgcgcgagagatgggagcaggcaggcagcgtctctgatttcttttcttgcacacaactggtaagaatcatcagcaccaatctgcacagggctcagagcagtcctccaaggcacgcattggctccactctcctgagcgacggaaggagactttcctgcttggaaggcttgactccaaggggagtcgaagccggcccctcactcaccccctcaccggagcacagccctgcgtgttgctatctgtgtgagtatgttgatgtggggctcacgtggacacgtgaacacacacgagctccttggtgggcagtggagagggcctggcactgccagcagggctcagggcacaccaagaaagaaaggttgcttggcagaaatgtgactaatgcccatgccagttccttatcattcttccttcttcctagtctccaggcagggatggagcaggaactgctacccacggggagagctcagacatttaaatctgcaccctacccctccattcggccattaacagcatttggaagcagttggttttcccagtaaggagatgggcatgttacggttttaaaccaatgatgcagggagaattggccagttccccacaatcagagcattctgaaactctaccaaggcaagatgctatagaagctcaaacaattgctatgattacagcataggcagggacagattcagattagatctcaaggaggcggaaacttgctgaagtcatcggaaatcttcacaaggagaaggccacagaaggatacctgtggcttccttctgttttttttttttctgcttctccttttcagggtccagtctgtcccttcctctggaatggcagtttacaccggcagtttacacaggatggcagtatctctgggtgtaagaaacctcagaactttcccctgctctaaaacggcctgcttgccctccctaacacgtgcttgtaagcagcacaccttgctggctgagtggtgctgccactgaactataccctgaacttggagggtctgtgatcaaaatagcaccaagtattagagaagggactcagcagacgatttctgtcccaggtgctctccgaagacctcaagtggcttggattccttcccagctccacgtgtccacaccttgaggtctgtgagggacactccacaggaggtctttctcccttcctcctttgctgcaattcccaaagttttcccaagtgacctactatgggcaggtattcacctctatcactttagttaatcctcaccagcgtccttccttgtaggcattatgacccctgaattttcaactgaggttgacagcgattcagtgacttgccacacagctaatgagttaagataaaaacccaggtctgtcctgcaaaatccacacagtttttataaagcagccaattgccaacaagttctttgggcctgactgagcgcctctctttctataaaataaatcatgtttacttttaaagaagtaaaacaattgattactcccctccttatgaacaagtcagaaaacttcagcagtaaaagagaaaacag

SEQ ID NO: 421 - DNA, 186596 bp, Homo sapiens
  source 1..186596: mol_type = genomic DNA
gcttccactcagatggagtgggcaagttccaagaccagtcttaccgtgttccagatgtctggactccaagcgccgattccttcccgctgttcagccgctgcgttaatcctccgcgggggcctaccgtgcgctgctctggcgaggcgttccaccagggcaattacccagctgaaagcactctcaggattcactaaagccggcaggagtcccccgcagggatgttccacaaggcaggcctaagcctcctaagcagttgcctccaccgcccggtaatcacctcgcttccaggtcagggaaccaagaaatgtagcaggactagctgcagacaaaacccctcagacaccgagttgaggaaggaaagggctttattctgccaggagcatcggcagacttacaaaaccgagctccccgagtgaacaattcctgtccctttacaactaagggggtctgcgtgagagggttgtgacccattgagcaagcaggggtacgtgactgggggctgcatgcaccggtatcagaacggaacataacaggacagggattttcacaatgctttcccgtacaatgtctggaatctatagataacacaagcagttaggtcaggggttgatctttaactaccaggcccagggtatgcccccggctatctgcctgtggatttcatttctgccttttagtttttacttcttcctttggaggcagaaattgggcataagacaatacgaggggtggtctcctcccttatgaacaacacagatttgagctgtgtgggttcaattatactcagatttcctcctgcctgtgccaccccgaaataacaagagcgacccctcctcttccttctcctcagcctgcttaacgtgaagacgatgaagacaaagacctttattgtgacccacttccacttaataacagtatatgtattttctcttcctaatgtttttcttcgtaacatttgcttttctctaggtttattataagaatacagtctatattacatatatgatacaacagatgtgttaattatctgtgttgttgggaaggcttctggtcaacagtgggctattagtaggtaagatctgggggagtcaaaaattctgtgtggattttaactgcatggggcattggcacccctagcccctgtgttgttcaagaatcaaccgtaatattttcatagcacactggaatcgacagaggggctcctggggctggaggtgtcctgtctggggctccagttgcctcagttctctcttccaagggctgagggggttctacaattgtggcgtgccttggaaatgttaggggaaaaggtatggtgactcgatggtttccaagtgttttgtgtcccagagtattcttatctccaacccccatcacttccagtaacctggtgtgttcctccttgaaagagttcaggcatgggtcctgttctgttcccttttagcagccaaataaccttcccattaacctggaaaaacaaagacaaaagtggcctttttttccatgttatttattcacattcaactagctacatgagggggataagcaaattaataggagctttttggggaggcagaggtatggatggaagggtgggattaaaacaaaataattttcagtggttaagtggaagatttacaaatatccattaaaaaagtaccctctggataaaataatcagaaataaaataaattagccacttctgatcactgcattccccaaagtctctgaaaatggtttgcactttagactgtcatgatttgcagatatttacatgacgcaggtttccaacacagaaaaatgaagactaacactgagtaacagattagtacaatgcagaggaaaatagagcaaatgaaaatagctatcatctggtagcaaaaatagatttatgccggtgttaatatcaaaataaagacattcaaacaaattatgccaatacattggaactattattcctaagaccataaggacaccttcttattgcttctactcataactaaaaggtctgcggagattctgtagtagccagaaggcataacttgtagtgtatgtagtaggggctacatcaaggttcaacagccaaataaaaactttattactttttaggcttgacatctttaacagtagaacaagatcactcatgataaatctggaagatgcagatggaagacagtgcttgaagcccaaacaaatgatttactacaagtaattaaaagcagaatatgagaaaagcagcagtgtaaatgacgtaaacattaaaaaatatattagtttgtatatttcccccaggaagtctcacaggaagcacaggacacctgtgcggctgtttgggcatcctgggtacttcttgccctcaggtgaactcccatctctttagttaggaccagaatccacctggcttgtaggagaggaactacatggagaagctgcattgaggcttttattattaatacctatgactcaaggaataccagccttggggtgctttggggcctggggagggaagtgactggctctcctgctacactggagactgttagctcatttctgaatggatttcctgcagcgtggggtagtcgacagctgtgacaggaacattacctgaagtgcagggtggttacctgcacaaagtcccatttccaaaaatttctgtgtaattcaccagaaattttggatggaataattagaaaaaaaaaagaggttaaaacatgtaactcaaatggtacagtgattagcattatttaaccaggagatttaaagtccagaaaattaaattctaccttggttcttcccaaatgatgccacgtttctgttttcttcctcttaaaactataaaatgtcctagagacatacatttgggggaaagatgcttttgagaaaagggacagaaggagaaaagaagtcatttccccctcaagatagttttaagcttataatatcaggatgcatcaccaagctgtttaaatttcagaaaagccctttatagatgctagtactgactagattttaaaatctgcatatagttctctatcatattttaattcgttcccacccccatctcaaataagatgactacagacgtaatgtttcatccagttgtccctgggactctaaaataaagcataagggcaagtgaaataacattaggataattaaagattttccaaatgccacatgacagtgctacgtccattcaggctgtgcattttgttttcgttgcttctttcttttttgagccagtctctggagcaggccaatttaacagccaatattaccacgattctacatttatcctcacactgtggaaactacatttgttttccccttgagtgcccttaaatctacagcctgcttcctcatgtctgtgagcagaatttggataaatgcttgagatggaaagaacaaagcatacaccaaagaatctgactgtgtcattcaactgcttagaaatggaaatgatattcacattgtgttcatcttggcatctcgataaaatgaatccaatatttaatgagttgttttaaaatgccagtcacgtgcagattccagaaggctacacatccactttaaataactctccattttgaaaatgcaatattgtccaactggttatttggtgtgacaatgaaaaatcatgcattcttttcctgtaattattttactcttcattcataacattcgatatgctctgaatttctttaagtatctcaaagtgttttctggagaaatctttttactacatcattatacttgatattccatagcattgctatggactttagaataagaggcttaacaattaggctttggttttaatgtcatctggacagaagttggacatgctttgataacacaattcaactactacacatattattgtaatgtgaaataacacatttaaaaagacgaaggttcccctttcagtagttataatctgtattattcaagactgctgcaaaactcacaaaagaatgatatggataacaagaaagtataggaaaggggtaagacactcacttaaagctttaccagaacacaacacaaagcaagaacatcaattctctacatttgtctataaggcagatggcaactttttatacaagatctaaaatatggtgcttattaagaggtagaaaatactaaaacagcatttaagaaaaacatgttgagttatccaaaacaatcagttattttgctaaacttttacaaagtcaaactgctgtgtggaataaactgtatgttttatattaaactgggacattccatactcaacagggaggtgatcaaacggagggacaaaaaacggggtggggtgggaagcaggaaacagtctcttaacttctcaaggactcagctctcactaaggagaaatttcctactgtctctctgggatgctattgtgatatttaattaattggaattcttttctcttatgaataatttctctgagcaacagggtacaattttgcatataaggcaatagaactatagggaggaacaagttcaaatgcttccttttcaagaaggtgccgtatacgtcttatataaaaatatacattccattaatcttatatcctctccctaaccactaaaatgcaaatgaaaatattcttcagactccagcaccagcagaattgttctgtatgagcaattcaagagctgtctgaggcaaaaagatatttcagctaccaaattaaacttgggtagcttacgcatgggtgagtaaccctgggaattcttatttcttaatgcacctgggagaggttgattttttttctacaacataattttataaggcataaatttaattggaatcttccctaacctttggaaaattagtgttaaagcttctttttttaacccacacatgaacattcaatctttcatttttattaaatagtttatatataaaaagaaatgtcaaggtgttctacattcatataaacaatcagggtaacatttgaaattgtaaagaaacgcactgaggaaaatatagacttaaagagttacaatgctaagctaagcacaagtgatcatcctagagtatcttttaaatatataaacacaggtttgtgccacttcagaaggcaagcacaggagaaatacactaatgttatctttcttctttactttttcaccataagacaggatggtccagtttggaaaaaccaagatcttttctaagttccaaataggtgccgttgctcacccaagagtcatcgtcggatttcctgtgaaagaagaaacaatttcttgcagactcttgaaaccagcgtcacattctcaagtctctttccttcctaacctccctgctttccccatcctcattcccacatgcattcagcgtcccagagtgttgggaccgggaattctgggaattagatgtccagaaataattttgttactttttttttttttttttttttgagatggaggctcgctctgtcatccaggctggagtgtagtggcatgatcttggctcactgcaacctctgcttcccaggttcaatcgattctcctgcctcagcctcccgagtagctgggactacagccatgtgcaaccatgcccgactaatttttgtatttttagtagagacggggtttcaccatgttggctaggctggtctagaactcctgacctcaggtgatccacccacttcggactcccaaagtgctgggattacaggcatgagccaccacgctggcccattttgttacacgactttaacttctcaaacttagaggctatgaaaagtggtgcttctgagaggaggaggatgtggggagagtctgtcatatacaaaacataacttgcatgactgtcagcaccttgggaatgactgcacaaaagctacacatcaaccaggttgtacataggaagtggttaactttttttttttttttttaaaggaggccgggtgtggtggctcacgcctgtaatctcggtactttgggaggccgaagcgggcacatcacgaggtcaggagttcaagaccagcttggccaacatggcaaaactccgtgcctactaaatatacaaaaattagccgggcatggtggcgggcacccgtaatcccagctactcaagaggccgaggcaggagaatcgcttggaactggaaggcagaggttgcagcagagagctaggatcacggcactgcactccagcctggaagacagagcaagactccttctcaaaaaaaaaaaaaaaaaaaaaagtaattgaaagccataagagtctggagagattagtcctgattttctattctttgaatagagaatatatgacacagaccaaattcaaagggcgcaaaagggtatacagcttcaagtttttatcttccccctctctgccagcctcctgattcttctcctcagaggtagtgatgttatcagcttcattctttcagggaaattccgtgtgtgtgtgtgtgaacacacactctattccctctcattctgacataatgttgtaccagacactgttctaccctttcagctttgacataatgaaacatattggagatcatttccgattagtacaataaggtaagggtcagcaaactatggcccaagggtcgaatccagccttctgcgtatctctgaaatactgttttattggaacatggccatgtccatttgtttaaatactgtttatggctgctttcaatgctgaacagcggggctgcataatagctactgaatgaattgaacctgatggcctgcaaaaccaacaatcttatcatttgctctttataggaaaagtttggtgactctagcaataagggattcctcattttctttttatacagttgtatgatattccattgtatggatggaccacaatttacttaataggtaccccactgatgggtacttaggttatttctaaactctagctcggcatgttattttgtatgtgtgtgagtacggttacattaacaattcctgtaattagcatggctgggtcaaagagtatgtgcatttgtgattctgactgatattaccatatggtttagaagcaaaagtggagtgtgcctgttttcctacactctcaggaatgtagatttttatcacacttgtttccctattccagtaacactatatgtttaaaaatgagtcaatctgtgtatcagacagttcactattttaaaacaaagaggctcaatttggtctgagctccagcttccacttagaattttcagtgattttgttgctgttcctcagtaagtgttaatgacaacatccaagtccccatattcctctccaaaatctctttgccaggtttctaatttgaacagtcccaaggaggactgctactgctgaacaactctcgctctttctccaattgaaaaaaattttcccatctaatactatgatcattttacagacagtcaaaaagaaaaagagcaatggccgccccagctgaagcagctttccgtcctttttcattccagacacaattccttcctgattgcaatgacagcataatcacattctgtatcttgcatttacatggtaatgtgtttccagcagagctccacaggcttcgtaaggtcatccttaatgcctcatgttggatcgagttggtgaatctccttaactagtccttgagacagtttggttacctaccatttttaatgatcctaaaaagtactgtaatgaacatcttcataattgtacatttttctttttttaaaaaatgaaaatagacaatgtatggaagaaaaagaaccaacctacttaagggtgtaatgtgtttatctattaactgatcagtaaatcaactgatcagtctgttaatctatccatttttctatttcttgcctttttcaaaaaagaatgtaacatttccatcttattctttaaacgtttaaatgaagcttgaatatttcaggatgaaattttggccagttgattttccatcactaatatcttgaatttgtggaaatgatcagaagggatctagtagaatctacatcaactttagggaaaagagcatcatattcttcaagacaaaaccttatttgtcactattttgatgttttggaatacagattttattactgctgctgttattaataactaaatcctaaaagtacttctgttgtccactaaaaacaaacaaaaacacaaacaaaaaacatcccaaaacaatgaaaagacactggtggccctggaaggacttgggcagatggagtagagcaggaacttgctgctttttcacatacacctatttaagttttttaaaaaaagaaaacagaaaaactaaaatcatataggccctggcctggtagtgaggagagtcaggccccattccagggtattataccgagtccttcaacagatcccccacctgccttgagctttctcttctactcagttataggaggagatggggaggtgaagggttgaagatctctcatacctcctttaaaaatttatatctattggctgggcacggtggctcttacctgtactttgggaggctgaggcaggtggatcacgaggtcaggagattgagaccatcctggccaacaaggtgaaaccccgtctctactaaaaatacaaaaattagccgggcatggtggcacgcgcctgtagtcccagctacttaggaggctgaggcaggagaatcgcttgaacccaggaggtggaggctgcagtgagtcaagatggtgccactgcactccagcctgggtgacagagcgagactctgtatcagaaaaaaaaaaaattatatctattttaacaagaccttcttggcaagttattttaaagataacagtaaatgtaagcccaagtgtactggaacttctacaatgcaagaaacagactgcttggaatttccatactgcttaactgtggagtgatcgtgaatgatctctgtcatggtgtaaaacatgcctatgggggtgaccaaccttagctgtggatttaataagctggcctggtgctgggacccagttctggcaggctccctgactgaggagctcctctgcaaactcactggctgagggcactggaaaagctcaaggaatgcaaaaatgcaggccctagtcctgtctgaagtcagcaagagggagagcctgaaggtaagtgcgggggacagggcctggcacagaggagcagtacccccacgtggaagcaggaaaagcctggagaatgctcttatctggggacagtactgttcactttctgcaaaccagaagcataacgtgctggcaccacctatcaaccaaaaacctactcaatccaggcacgaacctgaaaaaccgaggctggtgctccacatgattttcttctaagacccgccgcctttctctctgcagttgttcaatcctctgcttttgtatttcagcttcttctaagttcccttcctctagaaacctgaggcatcgaggaaaaaaaaatgaaaggatatgaattcaagaaaacaaaacaatcattactactcaacttgcatgtgtccacgactggatattcaaaatcctctcctatacgtaagaccccgccccaaccgtttaatccgtatcttgaagtagtcagagaagatatttttttgaattggtgatatttacataattcaaaaattatatctacaaaaaagaatttggggcaaagtcttcctttcttccttgtctctaattccagccaccttcaccctcccaccctagaaaacccactttattagtttcctctgcatccttctagagattcttcatgtgtatataaacaaatattaacacatattcttatccctccctccgtttaaaaaatataaatggtagcatgctatgtatcccttgatttttggttttggtttattttttatttaacaatatatcttacagatctttccatggatgtacatacatcttcattttttaatagccacataatatccagttgcgtggatgtatatgaatttagacaatttcctatggatagacatttgaatcatttgaatcattttaatgtgacaatgccgcaataaatgaccttgtatatccatcattttacatgagtaagtaggaaaaatctgtaggagaaatttctagaagtgaaattgctggatgaaagggtgagtgtgtaatttatatattactgaactgccctttatggggatcatacccaatttatattcccatcagcaatgctgagagtgcccttttctcccataacctcaaagtgtataaaacttctgaatttttgccaatctgataggttaaaaattgggatgtcgacatgatttttaaatttgcatttttcttattatgattaaggctgagcatcttttcacatgcttaagggatatctgcatttcctattttgtggactgttcattttcctatgtccattttttttaacacaaacttaagataaatttaattgaaaatgttcatcacagaaattaacaatgcttgccattctttaaacaccacatacgttattaatatatactgtatatttccaattaactccattcttaggcttgatttaagaaacacaattgtaacagactttatacaaaaaatacttccctaaaaaagtagacaaactgcacgaaacagtacaagcataatgtgcatagcaagatagcttgaagcattctatgtatggctttctttaaaataaattaggggaatgggcccatttgggaccaactgttacagctgacatacgtaaactgtttcacatctcttttaggcatttgctaacaacagtgttcaatccctgcaaaatgaatttacctccctatgtccattttttctaatgggttgatctgttactagatttctagaggcaattcatgacatgagttgcagatacggacttctccgtttgtcatttatcttttgaccttatatatatagttttatttattttgccataaagaagggcttaagtttgtttgttttgtgggggtgtgagttctcactgagacactcaggctggagagcaatggcgtggtctcggctcactgcaacctcctcctcttgggttcaagcaattctcgtgcctcagcctcccaagtagttgggactacgggcatgtgccaccacgcctggctaatttttgtatttttagtacagacggggtttcgccatattggccaggctggtcttgaactcctgacttcaagtgatccgcccgcttcggcctcccaaagtgttgtttgtttttaataaagccaaatgtaacaatcttttctttccttgggcttctagattttgagtcttaattagaaaggccttaggggagacattcttatttccattttacagagtaggaaactgaggccaggaaagatgaaaagacctaccatatatcacacaccttgtgagcagcaacctagaatcagcagttagatctcagtgcaccaaaatcatttaaatttgagggctcggggagctggaggttttaacttacttactttacactaagttctttattactgcatgcagtaaaactcttcaaaataaacaccttttttggcatttcaatgcaaatggggctttacagataataaaggccatgccacacatggatcctagttgggccccatctcctccgtgatacaattgtttaaagcatccccacctctcaattcctgatgacattttccacctttctcaggtgcctctggtggcctaaggattgttaataagactttttgtaaagggttttacatctctggagagaaaaatctttaaaaaatccttacctctggtctggcctaaatcgagtgtcagtaggtggcaataaagactttgatgatggatccatttcatttaattccagcgcaaactgtgtgaagctatagtattgctcgtagcctttcggcataggatctaagaagaaaataaatcattcacccctaacttgcatgttacttatgttacattttaattccttcacctttttcgtctcagcctagctacaatttttctctctcagctcccttccatttctgttaaaatattctgactaatgaacaggcactgaacatttctctataaattttcttctctataatttttcttctgcctacagggatgtggcctcctatgtgtggtcagaaagcaaatttatacaatgctgtgaagtttctgtagtgcttaagctatgaaaataatttgattttaaaataaacatgctcggctgggcgtggtggctcatgcctgtaatcccagcactttgggaggctgaggcaggcggatcacctgaggtcaggagttcgagaccagcctggccaacatggcgaaacaccatctctactaaaaatacaaaacttagccaggcatggtctcgggcgcctgtaattccagctacttgggaggctgaggcaggagagtgacttgaacctgggaggcggaggttgcagtgagccaagatcacgccactgcattccagcctgggcgacaagagcgaaactccatctcaaaaataataataataataataataacaacaataaataaacatactaatatcagctctgggtccatttttcctgattctcactctagagaatctgtttttgatttaagtgatgtcaaattctcttgaaactctgtttagtacctagaacagtgctgaacacagagcaagtggttaataaatgttattcttttcttccattcctaccctttttaccaattcttgcctctcctcaatcttacatctttaaaacattaggtgcattgccctaactggaattccaaaaaagctaaacatacccaaatttacatattgtataaatccaatgtagactactaagatctacttacagcctaagctcttcacacataacaagagaaatgcttgccagtaactcttctgcagaccccccctttttttttattgaaagggtctcactctgtccacccaggctggaggacagtgacacgatctcagctcactgcaacctctacttccagggtttaagtgattctcatgcctcaccctcctgagtagctgggactacagtagatgcacaccaccatgcctggctaatctttgtatttttagtagagatgagattttgccatgttgtccagagcagtcttgaactcctggccttaaacaatctgcctgccttggcttcccaaagtgctgggattacaggcgtgagccaccatgcccgactgggacccattttttgaatcttcataagtcctccttgtaactagtctaattctctgtgtatcctaagcataaaaatagtagcaaagtttcctatggtgtcttggtcagctccccagtaaccagggagtgaagatagtgctttttcttaaagatgggccagggatgctcactgccattagagagacataaagtcaaggaataatgacagtaacaaaaatttaaacagtgttgctttatcaaggtggtactttaacactgagacaggatcgcagttctcatctgtgatgcatactttaagcaaaggagacagactgtgccatttgcaaaatctcatgcttgcctctgaagctaggaaggcttccactggtgccaattcattctaacttcacggcaacctctgcaacagtgggagatgtggcagctacccattgaaagggccactgctggctgcctacttgaccatcatttctctttcttgcttgctaacagaatactgattctgttcaaatggcattgtgcccttactggggattaatccaagacatctaaatctctcttgcctactctgttgcccgtgactggttcacggatgggtctgaacccactgcaggctgacgtgatataaagtcccatttgctgcgggatcttaggaaatgttcctgagaaaagagaggcacgagagaggaaagctcttttgtcctctcattacatgcttggtatgctgtcatgcaggggtatgacactgaatggtaacaaccattttgcattcattaggggaaacaccacggcacactgggagtagcagaatgtatcctcactgatctgtgtgtccttgacacaggtaaattgcctatgtaacaaccctggagccaccccccccactcacttactgttgtgtaatagcacacagcctaacggtttaaaccaccagtcaaatggttttctgtttggttttttaccagcctgaagcatcctaacagttatatctcagaacaatggtttacaatatgactgtgacttggaaacaacataattttcggacttaggagatggaataagatgttaaagtatggtggggacatgctgatgaaagctggggttccctagctcttctgcccatatctgctccaagagctcagcacccttctggaatcacaggagtgatgaggatggcttttggggttaggtcagcctggggatagttaacatttgtaggtctcctgggtcactgcttttccaggaacactttcctctttgtccttgctgtagaatgacttcttgcatttcactgatactcttttatagtacccagtagagttatgcatgtggactgccagattccctcagagagtgcccatggattagcaatgcttgttctggggttaagaacccgggacccagcagcccagcagaggtgttgctgtaagtaagcatgacagggaggtgaagactggatgaaggaaagagggcctacacctctaacctagttcaaagcagaagaggctggagatgctgaacagacactactcctgtcctctgtggcttcttgtgtcatgcccacccatccacccactcacagcctggggtccacaaacccagacactcacttgctctccatacacaggcagaagaggagccgccgccacagtagatgctttcatgccatttcccaaacagccgatgaaccgcttttccactcctgtcaaacactgtgccttcaatctcatgggcattagtgctccagtattttgcctaggattcaaatgagttgttggcttagtcctttagcatcagcttattacagatattaaggaaagaaaaaaggaaaagctagagaaaggactgtaagagtggctccatactgcatattagtttgctagttctgggttccgtttttttaaccgacaaataaaaaatttatatatttatcatgtacaacatagtgtcttgaaacatgtatacattgtggaatggctaaatcaagctgattaacatatgtattaccttacatacttacttatgataacacttaactctctcagtggccgggcacggtggctcacgcctgtaatcccagcactttggagaccaaggcaggcagatcacctaaggtcgggagttcaagaccagcctgaccaacatggagaaactccatctctactaaaaatacaaaattagccgggtgtggtagcgcatgcctgtaatcccagctactcgggaggctgaggcaggagaatcgcttgaacccgggaggcggaggatgtggtaagccaaggtcgcgccattgcactccagcctaggcaacaagagtgaagctccgtctcaaaaacaaaacaaaacaaaacaaaaacaaaaacaaaaactctctcagcaattttcaagtatacaacacagttattaattatagtcatcatgttgtacgatagatttcttgaactaattcttcctgtctgaaattttggatcctttggccagcatttcccaatcctcccctccacccctggcaaacccatatcaaccattgtcccaccctctgcttctatgagatcaactcttttagattccaaatataagtaagattatgtagcatctgtctgtgtctggtttatgtcacttatcctccaggttcatctatgttgtcacaaatgacagggtttccttctttttaaaggctgaacaatattccattgtgttaatatgtaccacattttctttatccattcatccattgttggacacttaggctgtttccctatcttggccattatgaatagtgctgcaatgaacatggagatgcaggtatctctttgacatactgatttcatttcctatggatatacacccagtagtgggattggcagatcatatggtaattccatttctaattgtttttaggaacttccattctgttttccataatagctgtgctaatttacatttccacaaatggtgtgtttcctcttctccatatcctcctgaacacattatttttcatctttttgataatagccattctaacagatatgaggtgatatctcattgtggtttcaatttgcatttccctgatgattactgatgttcatcattttttcctcatatatctattggccacttgtatgtcttcttttgagaaacatctcttcaggtcctttgttcatttttaaatctgattgttttcttgctattgaactctctattcattttttatattaacctcttatcggatgtatagtttacaaatattttctcctattctacagattgtttctttactgtattgattgtttcctttgctgtttagtttgatataatcccatttgtctatgtttgcttttgttgtctgtgcttttggggtcatatccaaaaataataactgccctgaccaacgtcatgaagcttttccccttatgtttttgtttgagtagttctacagtttcaggtcttgctgtaagtctttagtccttttgagctggtttttgtctacagtataaagttctaatttcattcttcagcatgtggatatccaggttttccaacaccatttattgaagagactgtcctttccccattgtgagttcttggcactttgtcaaaaaccaattaattataaatgcatggatttacttctgagctctctattctgttccattggtctatgtatctgtttttatgcttggattttggctttaaaaaactcatacctttagttatttaataaaaatgaatggttaactatctgcagtttgtaactcaactaatatttgtgtaagatacatttgtatttctacctttgctacatacaatgtaagagaaggctcagttcttggacgggtgcagtgcctgatgcctgtaatcccagcactttgggaggccgaggtgggtggatcacttgaggtccggagttcgagaccagcctgtccaacatggtgaaaccccatctctactaaaaatacaaaaattagctggctgtggtagtgggcacctgtaatcccagctacttgggaggctgaggcacgagaatcacttgaacccgggaggcggaagttgctgtgagctgagattgcaccactgcacttcagagtgggtgagattgagactccatctcaaaaaaaaaaaaaaaaaaaagaacaagaacaagaaaagaaaaggttcagtttctatatatcaagcgagtagtgtgggtattctcactatgtattggtccaggtctgcgaggcaaccttgcactctattctgctcagttcagctcagctcaggccagtccagcccagctcaggccagtccagcccagaggattttatacagttccacactgcagccagcagagggagctctagcaccctagagttggttttttttgtttgttttttgtttttcaaattacctggctgccctaaaaatctctatgaaagaatggcaaaggcatttctccataaatcaaaaaaccctagtactattttcagcttaaacagagtccatacttggaaactaatcatgttgaatggcattttcaggtcagattctggtagttcagcttccgcatttcaaggctgtggtaaaaatggtggggcacggaagtgtctcagacctgaattagaaatttaaagttgagctctccagccatgtaagaatgaaggaaaagcaaaaagaaaaaaaagactattgagactcttaagttgatttatttattttttgatgatacagggtcttattctgttccccagagtagagtgcagtggtgcaatcatagctcactgcagtctcaaatttctgagctcaagtgctccttctgcctcagcctctccagcagctgggactacaggtgcatgccaccgtgtctggctaatttttaaatttgttgtagagatagggtcttgtcagattgcccaggctggtctcaaatttcaggcctcaagtgagcctcctgcttcagcctcccaaagtgctgggattacaggtgtgagccatggcacccgggctcttaagtttattctgaagcaggtgtcagattttcccttagagatatctgccaacaaatccagtgctgagaatttgctggaagccaccaagggacactgtcaccttccacaggcgagtgtggcatccacttgcagcatctctttcaacaccagacatgcccagtgttcatctctcatgactatacacccattttctgcatgtaagtgaatgagaacaaggtaggtggtagatatgggagtggagcatgtttccttgcagaaaatgttgagagcaacgtggctttcacctgggtcacgggtaacatatccctgcttcaggttgccttttgtttctgtttgcagagagcttagacaaagctttcaaggtagggtcatttttattttgtcccacatgtaaggtcattatgggctttatgtctgtctataatccagtttgaggctataataaagaccccaatccacctcttcctaagtattccctataggttacaggtggtgcagagaggcattgcatgaagttccacaataaaacctcatctctctgcttattatttcgatctttgttaaatgccaatattccttgaggagggtcatgttttaaagctgttttaactacatacaatttttaagagcaagaaggaatctaggagggagagaaagcagggagggccgccagcaaggctgttaaaatgagagaccattccatactttttgcctctggccaatttttccatttattctctgaatgtttatgagtctctcatgtgtgccagacaccattgcaggaatcagggctacagaagtgagcaagatagactaggttttgcttttctggagtcaaggatgatgaggagggtatggagagcagaaaataaacacacacagcaacgatgagcaggctgacttcagacggtgataagaactctgaagaaaatgggacaggatagggagtgaatgacaggatggggctggtgatggaaggatctggggacagctgcccaagcagaaggaaatgaagaaagagaaagaaggccagtgtggccagaggacagtggggaaaaagagggaggaaaaagagaagttcaggttggagaggaacgaggtggcgtgtgtgtatatgggtgtatctgcaagtgtgcaagtatgtgtgtgaaagggtggagatggggagtacagcctgtgcagcgcccgacaggccaccataaggatgcaggcttcaactctgagaaagatggaagctgttgggggattttgctcaaaggaatgatacagcatgacattaaaaaaaaaaaaagtctggtaaaccatacctaatgtaacattgaccattttaactatttctaagggtccattcagtggcattaaatacattcacaatgctgtgcaaccatcaccactatctatttctagaactttttcatcttcccaaactgaagttctatacccattcaacactaattcccccttcctccctcctgcagccccgggcgaccaccattctgctttctttctctgtgaactggattcctctggcgatctcgcagaagtggaatcatgtaatattcgtccttttggggctgacttatttcactcaacataatgctgtcaaggtgcatacatactgcagcacagtgatttatgttttaaaagggtctctctggctgctgtatggaggacagaccttaggggagtaagaggccaggaggggccattgccctggtctaggtgacagaggtgcagctgggaccaaggagctcaggcattgcttgcctgctggcataaaggtgaaggcgaaaaatctctcaaatgccctgtgctctggggccctggctctgccacagcccttccagggtcagagctcagagagtcactggagttacctttataaaattcactttgcagtagcaggaatcatcatgcaggttcttgatgacaatctctccatagtgctcaatccacctctgcccgcttaagatgttatggatgcaagaggtcactttgttccactcaaaatgatccccaaaactaaaaagaaggaaaaagtagaagtaccaatttctagaagagccagcagcaaatgcaaacaaactctgctcttttataaaataagtcatgcaatgcattattcatctctttattcacagaagcaacactggctaagtgtctatgtcacactggatgttctaggagcttccactctccaaggaggcatgcatgccacagagaatgacagcattcagactttgcactctggaagctaccagaggcttcactagaagctggtggtctcttggaacagcccactccctcctttgacagaggaggcaattcagagccagaggggcttgtctaatgttgctgaactaggaaagggaagcttgagaaagggatgaaggttttatacaatctgctaaacatacattgcctgcatcctttgtgatgagaaagtattcagatattacttatggaattcaataattacgaggaaaatggtattaataataagaccagatacttacaaaacatatgcaatgtgctaagtactattttaggtgtttcatgtatattatctgtttaatcttcacaatagccctaggaagtaggtggtttattattctctttttctagatggggaaactggtgatgagaaaggtgaagtaacttgcccagggattcgctgttagtaagtgccagagtgagcaggtgaatctcggcagtccagtttcagagtccctgctcagaagcatcttgctttataaataagtatcaatcatccctatcagatcaaggccatacttttcttaaaagggattttgatagcaaagcagcataataaaggaaaaacactttttttaaaaaaattgagatagggtctcaccccttcacccaggctggagtgcagtggcacgatcacagctcactgtagcctcaacctccccaggctcaaatgatcctcccacctcagcctcctgagtagctgggactacaggtgcgtgccaccactatgcctggctaatttttgtattttttctagagacagggtcttgtcatgttgcccatactggtctcaaactcctggacttaagcaatctgcccgccttggcctcccaaagtgctgggattacagatgtgagccactgcgcccagctaaaaccaccattcttaatcttgttaggaagtggaaatgagtttttaataagcatctattcagggaactttggtctccaggaggcatttccatttgagggagaaacattttttaaaagtgagcttgccaaaaggaggaacatttaaacctactgtcagacagattaaaagaaaaaatacacactcaatgcaactgccgggggcgggggtgggcatcctgtccccaaagcaaaatcttggccctaaattccataaagctccttaaccacagaagaagaacttacactggcagagtcacatgggttgtgccaattggaacaatttccatggatttgccccagaatttgtttttccatctcacatctgaaatgaaataccaaatattacatttttagcaggagaggtaggtagatgaaatagttcctaggctagataaatgatcaatcgctatatagtacaacctcttcacaatcaagtcaattattgtataggataacttttcataaaatataagtaccaaccccatatgggcccttggagcagaatcagggaaactaaaatgataagataaagtcctttccatgaatgcgagaagtgaaaacaagtagtaagcacacagagaggcccaggctataactgagtgtgttataaggtaaaatgaaacctgagaagaaggagtgacgaatatgcttggagaaagcatcagaagaggcttgtcagaaagggccatctaaatggggctttgaggaataagcaggagttcactgggcagagaaaaagcaatttaaggccaaataaatagcttgtctgaggggacggaagtataggaaaacacagtcaaatagtgtggttctgtcctataggtctcagattgtcttatctagagaagagtagaaaggttgagaacaaaaccaggtgcagtggctcatgcctgtaatcctagcactttgggaggcagaggtgggtggatcatttgagatcaggagttcgagaccagcacagccaacatggcgaaaccccttctctattaaaaatacaaaaattagctgggcgttgtggtgggtgcctgtagtcccagctgctcaggaggctgaggcaggaacccaagaggtggaggttgcagtgagccaagatcatgccattgcactccagcctgggtgatggagtgagattctgccaaaaaaaacaaaacaaaactgaaaacgaaaaacaatgggctctccaagcctggctaagagtctggtttgtgtgcactgagtggaaataatcaggccactgatgtgattagacatggaccttgcaaaggcaattggaagccatatggagaatggaacaggagtaggagagaggagaagcaaggcgacaagttaagaggctactgcaattgcccaggggataacaaacgggatgaagggaaccaagacaacagacgcggggaagtgagtgagcccagaaatactaaagaagaagaaataggcactaggtcaactaggtgacaagttagatacagactgaaaaagaacgaatttatgaacaatgtcagatttctctaacttgcaatgaatggtggtaccaacagagaagccaggaaatagaaaaagaacagcaagaggatcccatctggctgctgcactgaggatctacagatcacagggaaatcagggttgaagcaggggggacagtggggagccctggctggggtccaggtgagagaggtgggtctgggaccagcgagcacagtgggcctcatattgtttaatcctatttatataaaatgccccaaacaggcacatttataggctggggaatattgagagaaatggggcaggtggcagagggggtggataatatttgctaaagaggattctttttggagtgatgaaaatgttctaaaattaactgtgctgataactgcacagtttattaaattcacaattctgtgaataaaaaccattgaattgtacactttacacgggtgaatgatatggtatataagttatatgttcataaaattgttaccaagagaaaaaaaagatagatggctgtttaaagctaaagtattaacaatgtactacatggtttatgatatacagaagacgtatgaaaaaatagtagagaggttgggaagggaaaatggaagtatacttctgtaaatctcactatatgaaactggcataatattatttgatgatattaaaaatatataacataaatcctaaagtaacaactttaacaagaaacaaaacaggtaagtatagctaataagctaacaggggagatgaaagagaatgatagaaattattcaatccaaaaggcagagaaagaggaaacggagaacaaagaacagatgtgacaaacagaaaagaaacatcatgagggcagatttaagcccagctacatctacaatcacaacaaacggaaatggtttacacaacctacataaaaggcagagaaatgtcaggctgggttacaaagcaagatttgggaatcctaggcccatggaaataggtagattgctcaggaaaaggctgatggggaagtatggcctaggagaaggatgctaaggctgagaagggaaggatgtaacacaggagcacacaaaactactttgagaagacccctcgcattaaaaaaaaatccaacttttggctgggcgcagtggctcatgcctgtaatcccagcattttgggaggccgaggcaggcggatcacaaggtcaagagatcaagaccatcctggccaacatggtgaaaccccatctctactaaaaatacaaaaattagctgggcatagtggcgcatgcctgtagtcccagctactcgggaggctgagacaggagaatcacttgaacacgggagacggaggttgcagtgagccgagatcgcaccactgcactccagcctagcaacagactgagactccatttcaaaaaaaaaaaaaaaaaatccaacttttgaaaaaacaaagaagaggtgcttatagcatgagtgagatttaccaattaggaggctaggaaccttatgagaatatttccagagggttttggtgagagagcagttttaattttaaactttaatagcaaaggtgaagaaagaaaaccatggtacttgtcactttaaactggaaatactgattgcctccaaagagagaaactgagtggctggggaagggggttacagtatactgtttcgtacttttaaagtttaatagactgcgtgtgtgtgtgtgcctgtgtgtgtaaaggtaacgtgtgatatcactagtagcagagaaaaatatttttaaaatgtatatgtgctcactgtccaaaaacctaggatgcttatatgttccttctacagtacacttttttttaataaattgagagattaacaaaattaatccatctaggaaatatctatagccttatttattctttagaagatttacccacccaaccccaactcaaaatataaactgaacaaaattttaggaacaatcatctcaaaaatgaaaagaagtaagcaatgtaaaacacgacttcagaaataaaatttaagtttgacaaaagctgaaaacccctctgctgtctacactctgataaacaactgtaaatatttaatgtctcttgaaatatgtgaggcatttcaaatgatttttacataagataaagttacagaaataaatggaggtggctcagataaactaagtgagagatgagaggcaagaacaggtggcgcagatccttccaaccaggcccaaatccaaggaccacttttgatctcagtaagaattgacagcaattcttggataaaataaatagataacatattacacaatatgatggaagtaaaatgtattagcacattaccttgccagaaaacaaaatttctagactcagcatgacacgcagagataggcggatggtggctgacctgatggaaacaaaggacagaaaaacaaaaaatgaatgaacttttgtgtctcatgaaatccattctttctcccctgcactgagatgtaacagcgtgcaatgctgaactgaaggaaaaacttctttagtttccctcatcaagtgtgtcctcaagagggcgctcctgatacagtcagctcccacttgctcagattggtcaaggctgaggggaaggcccttgaacggaagcctccagaagcctccgtgggagggcggccaggtggcgagtgatgaggatagaggcgcattttgaaagacataaaaataaaaacggagacatgtgaggactgctcatccataacatataatctgacattggctaccaatgtcaacatctcttattagctgttctgaaagtagctgcagatgttttaattaagatatcaaataacaagtattttaaatgcaacccaaaatgttcttcctcgggctcagccaatttaactcttgaaaactctgcatcataaagtccagcctcttttcaaatcacctacaagaagaccaatgcaaggtaatttttttaaaaaagagtgtttctattaaaaaaaaaaaaggtaaacacaattgttgaggaaatgttagtcaactgttaagaaattttatttatttttggtctaataaaactatcttaagcaaataagtaatctcattccagaaaagagaatcccctggagcagagagtgccctttggcaaggggtcattactcattttattcagcagtgaagaggctgaagagaaaatggctcctccctctatttcctcatctcagtcacactcagggaacgttgagaggtgtatatgctgtcattctaattcagcactggtgaaaccacagtaatgctgccaagggtgtttccagaaagttctctgatgtagctgattcttaacagaggtgtcttacattgagagtatctagctcaaagcctgcaccttataaacgaagagactgaaaccagaaagataaagtaacatttcccaagccacaccaatagtcagggaagaggtagcggtaagtcccagcagttttggtttacctcactggttttcaaactttgcaaaaagaagaaaaaaaatgttttaagcagctgtacagttttcagacccgtcttatcaagaacccagaatactgagcccttgcttgagataaacaggtggggaggaagggagggcagtgggtgacaaatccacagctgttcaccttccttgggaccctcagctgaggaacatggtttgaaaactacttctgtatgccaggcctccagcaggaggactgcacggctgggaggatgtggtcacacacgccacacccagatgtgactcatgggattacagccgtaccagtgtgggccaaagaaaggtagagacaaagacgtaaatcatgtaggcatctttcagattcctcaataaacaccaacgccagctgcaatacaaagcaggagactcaaatctgctgctctttggtttgtcttagttcccatgtgcctcctaagaacgtgagcccttctgtgcctgtgggattttcaagggcaactttcacttcaagcactgacttagaaacctaatcccataatgtaactctctgatttcctttgatgttgtcttttttctttttttgagacagggtctccctctgccacccaggctggagtgcagtggcacaatcacagcccactacagccttgacctccagggctcaagtgatcctcctgtctcagcctctcaagttgctgggactaaaggtgtgtgccaccacgcccggctaattttttcactttttgtagggatggggtcatgctatgttgcccagactggtccggaactcctggcctcaagtgatcttcccacctcagcctcccaaagtgctgggattacaggtgtgagccaccatatccagttatcttttttaaaaaaatcctaccacttggagataccttatattaaaaaatgctacattcttctccttttcttcactagctgtctttcgatgaaaacaacggagctagctttgaaaccatgggatcatataaaacaaaatcaaggtgcagtggcatagccctgtaattccagctacttgggaggctgaggcagaaggatcccttgagcccaggatccaggagttcaagaccagcctgggcaacatagtgagacactatctataataataataaccattaatcagctcaagacaatccccactccccacttctccaccccagctggcatgacccactatgaaatggaaggaaagctatgaaatgttcctctcccccataatgtaaacatattttaaagtggattattatgaagtagattatattcatcccacaaaaacaatgtagcaatgtgggagaggagcactatagctttgatgaagaatttggcatctttacaggtatggccgaatgtaaacacagtatataaaaaccatacgcctcttctgtaataattttaaaccccataaaacagggataaatatacatccatatgaattacaagagaacccctacagtatacacacatctcataaaaacccaaccttgatttttttaaactattgtgttagataatgaatgaatgtttagcagattatgtttagatgggttcaacacattttctgaataagtctcaaccttcaaatatcagtaactttgcttatttctttatggcttacacaggcctttgggaatggtttatttggcccacattgcttttaagagttttacaaagctttctggggagatttacattgatagcttattattttgtatatttcctcctatttctggagcatctgccatgtgctgcactagtgtccgggaacgagggaaaggtttttgttgttccatggacctgggccctgactgcaacatcatctgctggctgtatgaccttcacagcttttcagtcccttcagcctctgtcacctcatctgtgaaataaggctgattccactgactcggccaactaaaaaaagaacacatacaaactgtccaggatcatacactgatgtggattaggcagagactaagtgaaaatatactcatttaaaagagactaagtgaaaatacactcatttaaaaaatcaaaatatagatttctaaaatgagtgtattttcacttagttcttagggcagccttgtatcttggtgagcctgattttataaattaggaaataggggttctggccagcaaagagcttccccaatgccacaacattaatgagtgataaaggtagcactccaaacctatgtcatcctcttccagatccagggctcgtgtccctccccaaagccaggacacatcattaaggttccttctcatggacatttagagaaaaaaaacttttgaatttgacctttccaacctcagtctcgcatatttctttgtaaaatgaggtgtgaggatccctcttggcttcaaaatgctctgattctaacatctgctgttaatgtcttcttcgaatcttagcatcaaaggtggtggcggatgctggccaacttgaaaaaattatacaaaggctttgattaacttcaatgcccatggaaaaaggtaattcacagttaatcacttaatctttgttgatggcaatctttctaaaatctattagagtagagaataatgagcagaatctaacctgtctttgttattgcaggattttggttgagtctgtattctccttacattttaattcaggcaaaaagggcagtaaatgcatttgtctgaattgacccagccctggaaggagatgctgtctgttagcctgttgaataaacccaatttagactttttttttaagcattcttccctatcacgtcctctccaatcaaagaagagcaattcttgattggtaaggatgcccaagcattcaagaaattagtacacatggtttttattacgcaagtatttatatggtaacacatgtatctatctttctttctacaagccccaatacagttcccctggcagttaagaattctggtaatttataatttatttatatatctgaggcctttctttaccttgacctaatcatttttaatttatgctttgaatgcactttatataagaggtcaggggagaagcagataggaaaaggaggtattttcagtatttttgtactttgtaagtttttatttttcagatttagaaaagtagcccttcagtacatcagttctcccctgcaactgctccaaggcataactatccagtcctcctaggtcctgatttccctgcagcaatacagggcaataacgaaaaagagggcaagtgccaggtgaagaagtcatccagagaggggaccaagtggccattctttccaggtcactcatcaagtacttattgattgcctgtgatgtgtcaggcaccgtcctagtcaccaagggtaaaaattcttaccctgatggaatttatattttagtatggaagtgggtaagacaaacgacacataagaagcacataatttgtcagtagaaattgtgttaaggaaaataaagcagggcatgaggatgtggggacagtgagtaggagtgctggtcagacagggtggtggggcaggactctaataatggaaacctgtggggctgagagaagttcggaagttaaccatgcagatatctgagagaagcacgtcccaggcaggggacacagcaaaggccaatggctggaaaatgcttggtatgaagcagaagaagcaaggccagtctggcagagctaaatgaggaggtggggtaagtaggagaagtgtctgagggtgagattttcgagggcgttgtggaccatggccaggactttggattttattccaagtgacttgggaagttggtggaggatttagagcagctgctgcttctgttttaagcagtcactggggctgctggataaggaattaactggctctggaaacaggagaccagtagtgagtcctactgcaataatcccagtcattgattttagtggcctgagctaggtgaccagcatcacatgggagagaaagtgaaaatggctggctgtagaaggaaggcttctgaagggagaccccaggatttgctgatgagaggatgtgaatgatgagagaaagagctattaaggatgatgccaagaattctggcctgattttggggagaatgcagatgccaattattttcccttctcccatgttcagagtgaatcacttatctcataaacacatggcctcttgcaaaaaattaaaaaacaaaaacacattaagtgctgacttgacctagaaatggagaaaaccacaaagcaatggtttagttgtctcatatttgatttattgctggttttatttgaacggcttgaatttaccctttgagtgtctttaagaatttaccctttgacagtatctttacttatttaatcagtaataaataactctgctaactagtagatacaaggactatgcagaggtgacatgagtgtgcaaggaggaagtgatgggtgtggcaagtataagcctgtccaagaatgtatggactcagagtcctccaataaataacagaaaaggaagaaaggctgagcctgtagagcaaaagaaaagatcttcatttcaatctcttacattttagtaacttttaataactgcactcagcttttctgacactgtcaagggtatgcaggtgggtgggtaaatggttaaaatgaacaatgatctggacaactaaagtttcatgtaattaggaaaagctacttttagactgtagcttaattgcatatcctttcaacaccaaacctttcccaaaggtatgaaaaaaggaacatagccaactgaaataagttttctgacccatctattcccttgatgcagctcaaaaccagtgtgttagctctgccaggcagcaggaggacgcagcaagcagggaatcacctgccagaggatacttagtccctgaacagtaaggaaagaagggaagtccttcctctctgaattcttccttttgtgagtttatgtagaaagccaaggttgaaaccgattttttggcacaaaggaaacctctgagaaggtggaagagccagagggtcagaacctaggacaggaatgtctatgactcactcctgatcggtcctctttcacaaaggccacacccctgcctaccacaggagtggagaacaaagtcctatgtgagtctggagagattttgcatggtgagaacgaacagcatacacaaagggctgctttgtgtatactgtactccagtagctctgagcatagtcactgagtccacacaagagaccccacagagagtaaggggaaaaggaggcagggatggaaacagaggggctgggttctagcatttgctgaggggcaccgggaagctcaaatcctctaggccttggttttctcgcctgtaactgatccctgcctcaccttccacagagcgccgttttggagatcaagtaagatcatgaatgcacggagcactctacaaatctaatacttgttctaagaaaaatttttaacaagaaatgctttctctgatttctgaccacatgaatcattttgatgttgtggttttgggtcttttagacgagaaacaatacagagaggcaagcttcgacagagtcgaactctcaagcagcaatgacttccacttgcctggctgctcaccacctcgaacatccacatgcccagcaaatccacaagacaacaaaatcaaggggcttggaagagaggcagccatcactttccaactcagactgttgtctagaaaactcagaagaaaagccaagctgtttcttgccaggtccttaagcttggagatacaatttccatcattatcctccttagaaaaaaattccacccaaaaatattaattcggggggcttgcccagtttattatactagtcatccagaaacctgtactcattgtagagaggcacaagaaaacaaacctctaagccatgagagcttatcaatgacacataatggacaagggcggagtcatgctgtctccatcaaggtagactgtctcctgggctggaggcagaaagagccataccaggtaccagcaggaaacagaataaatgctctggcactctcttcagatgtgttaaattagaatagacagcattgggagagggaaagaggggtactgagctgataggctcctgctggccagggaaagggaggccctggccctacacccttcccacttctagggcagaggactgcctggtgtactgaatcacatagctgcatcttcacactgtatgctcacttaggattctcattggcttcccaagtaatctgcctatgggaaaatcatacctagtcacactggacaatgctttctgatccccatagcaggtctatttttcacagtaaatgcatttagtagcattctagtttatatacatcagtctcttgtaagcttagtgtgaatttatccctgagagactcatccattcttaggtatattaaaataaccaactatctgcagccatcaggctaaattccagacagatgaagcagctccatgatgatcaggactggtggtatgaccatggtgaagccagctgtgagaactcctggctgcctgacagccattttctgtcagagactcaccagcgacatcaagtccccttcaaactacttgtactagaagtggagatatagcatatcttatttgaacataagaaagtatatattatagatatatgcctttctagttttctttcatcaagtcattcctcagcctcctctctgccttgtcaacactcctcttactattcttttccctttttttttgaaatggagtcttgctctgttgcccaggctggagtgcagtggtgcgatctcggctcaccgcatcctccacctcccaggttcaagtgattctcctgcctcagcctcctgagtaactgggattataggcatgtgacaccacacctggctaattttttgtattcttagtagagatggggtttcaccatgttagccaggcttgtctcgaactcctgacctcaagtgattcacctacctcagccttccaaactcttactattcttaacactttatattaaaaggcattgtaggccaggcgtggtggttcatgcctgtaatcccagcactttgggaggccaaggcgggcggatcccatgaggtcagtttgcgaccagcccggccaatatggtgaaatgccatctctattaaaaatacaaaacttagctgggcatggtggcacaagcctgtagtcccagctactcgggaggctgaggtgcgaggatcacttgaactgggaggcagaggttgcagtaagccgagattgtgccactgccctccagcctgggcgacaaagtgagactctgtctgaaaaaaaaaaaaaaagaaaaaaaaaaaaaaggcatcgtagaagttcccactaaatataagagcaatagccatttactgaatatttccatcagtgtattattttgtttaagccttactacaacctattagtcaaacattatcattcctaatttacagatttttttttttttaaaaaggaaggctcagaaagttgaaggaacttacataaggtcacacatggagcaaattgtggagttaagatttgaagcaggcaggtctgtacatcctacacccagcacattctaaactactaacaataaccagttctctttcttgcttatttcatggaactaaatgctgagttatgtaaccctctttctgtctttgtgcacatgtgcccaggagctctgatttctcccccactgtgccaccatgggaaatacacaaacagatcttgaatttggccctgtcccaccagggctcagaggactgaagctcaactttacacagctcatgttactattcttttcttatagctattcatcctgtcctgattgtctgctgtagtttgaggctatttttggcctttattttttcacaagagtgcatatgataccatggaaaccaaattatattttcatttattctcattctattttaggttcagtatttaaataacccagatgaattctgaatcacacagattatcttatcccctttaactactgatttaactccctacttccccagtgttagtccatgtttaatttcttgttttagcttctaactggcaagctactgacagtgtgctttgggttactgtatattcactttcctttgagttccagagaacactccttatcatttacagttaagataagcactatcatcataagtctctcagccaacccacgcttcccctcctctccctgtagtgcaaatccattgataaagagagcagcaagataaaagaatattttagcaatccaccccccttctcctcagttctctaagaactagggggtgagaaatgtacagaagcaatgatgtctaatgtccctagggatttagggatatacagagagtggacgtgtttgattgctaccttaacaaggtgggagagggtgtattttattttttaaatttgttataattttaataaaatttctttctgcatatcttagaggttttttttaaaatttcaatatgtatacactctattttaggtaaataatcccctgttgacaagcattttagatgttcccaacactccaccattataaactctgctggcatgcatcaataatgacagcaaacactcatataacatgtatcttcatgtctcagatgctgctccaagtgctttgcagacagtgcctcattgaatcatcacaaaaccacgtgaggtacatataactgtcatcctctccactctcaagagcaaactaaagcacagagaagctatgtaacttgccttgggttatcatgctagtaagaggtagaactgaggtaggacggatcctgggctgtctgaagcctgagtattactctatgctacttctatggcaagagtgtgatggaaccttaggctgcatgagtacaaggttgtgcatccatcagatgagggcagggactcctgtccggacccctcaccccccaccccactgcaatatcctagcacctggaacagtggcaggcacatggtatacgttctagaaataatttattgatgtgaatgaataaatacatgaatgaatgattcctctcaaatcaaaattgagaataacgcatttatctggcgctacccactctgctgggggcattcatgctctggaataatgatgtcagtgtgttagggagcaatgttaaacctctaaattgaagtttgggccaacattcatcctttcaaaattccttgtgctaatgattttaaagagaaaggacaccggcaatgcatgtagccaagcaagtgtgcagaattacgggtggtaactttatgcccctgggtggtggcttggcttcagtggaagggaaatcgatccctccctttatgttgaaaagcactgtaattatctcggctgctttgaagccagtgaaaggtggaagataaatatttcagaagcacatttaatgggagacataagcaacccctcccaacaagcaaaaaatggtgtacatctacctgttctgaaaaaaactggaagcccttgtcctcccgaatacattcatatgtttctccaagaaccggattaaatggcttgcttccagctcggtagtagctagatgcatacgctgatatggcaaaggctgccacatatacctaaggacaagagaaaagaactttgtcatttccgtgtcaccaagagctttattgttcacaaagaactaaacaaaataaaacctctatgattttctttcagaaagccaaagatttgtctttggttgtttttaaacaacataggtttaaaattgtaggtttaaataatgtttatctgggccccaaaacaaattaacccaatgttttaaagctgtccatttatcttgatgcctaaaagttgggagatgctataaagacgatgacatttctaaactggactacactgtttctggaaactgttaagctgagtccagtacttttaagcctgacagtatctgaggatcctaatatggtgctaagccttcaggggtggagtggggaaagagtattaaaaaaggagtgttaaaaaatccctccaaaactcaggaatcagcatcataaatttaaccattcaaaatgtggtattatagaaaccaaaacattcattttgaccaaagaaaatctgtgagtcatttcctaagcctgggaaacaagccacaggatatagtgactttaaagttctgcttttttgggaggaaaagtgaaacatccaaaaaaaaaattaaaataaagagaggaaggaagaaaaactttacgtgaacacgaagtgaacaaactctctgggcagcccttactgtgaggtcttggcgtctttagcaattccccgtcagggcatcagggaggcacattaccttctttgtcttttcttccatgtatgtaacaacagttaagcctaagcagggatgtccaattttcctttctaatgtcaggtagtaacaatctcaagatttcttcttcccagcacatttcgtgcagtttcttatactgaagaagagctgagtgcctttcataaatgcccactagtcacataaccttctgctaaatttttgatgttgcctgtaatagggaccacctcaccacctcatgctatagaattctctagagcagctggatggcttataaaaatcagctatactcggctgggtgcagtggctcacgcctgtaatcccagcactttgggagaccgaggcaggtggatctgcttgagcccaagagttcaagaccagcctggacaacatggcgaaacctcttctctacaaaaaaaatacaaaagacatagctgggtgtggtggcacatgcttgtggtcccagctgcttgggaggcagaagtgggaggactgattgagcccaggaggtcgaggctgcaatgagccgtgattgcaccactgcattccagcctgggtgacagagcaagaccctgtctcaaaaaaaaaaaaaaaaaaagaagggccaggcacggtagctcacacctgtaatctcagcactttgggaggccgaggtgggcagatcacgaggtcaggagttcgagaccagcctgatcaacatggtgaaaccccatctctactaaaaatacaaaaattagccgggtgtggtggcgcacgcctgtaatcccagctactcaggaggctgaagtaggagaatcacttgaatctgggaggtggaggttgcagtgagccgagattgtgccactgcactccagcctgggcgacagagagagactctgcctcaaagaaaaaaaaaaaaaaaaaagaagaagaaaaaatcaactgcactcaagtcagtcctacttgtgactgcctgtgttcttgaaacctgggtgtctgttcctcttcctgcttctccacattggtgacctgtgaaacagtacagccacactgtgtatggaatgctgaatcaacccttaatcaccttcaccatgtaaaatagaacacaaccgatgaaagaacctagtgccattcatgatgttgtggggaagacagagcgaaggggaggcagaaggaagcactctccctgtgggttggtggcatgagggagagtccaggcaggggcataagcagacgtgcaggacagtaaacaaaacccatgagataagactcctgcttagtggttatgttggggatgagaagcctctcctcaaacctctgctcaaggtcaattacactgatcaatcagctgaatatcctaagggtctctaaattgccacagcatgaaacatctttaagaaactttcatcctcaaagccaatcatttcctttaaagaaaagagctgtccacaaatgctgacttttaacacttgcttagaagctatttctagaagatttgccttccttttattcagcaaaaattatctggggacaagtaacaaagaagagtttaaaaaatacagcttgtttttgtctcctaccctgattatcagtaacaagaaagaaagtctcttgggccaggtacagtgactcatgcctgtaatcccagcattttgggaggccagggcaggagggttgcttgagtctaggagttcgaggttgcagtgaggtaggactgcaccgctgcactccagcctgggtgacaaagaccctgactcaaaaaaagagaaagtctctttgatggggaggccctggagactgggcagaatgactatgggctatccctctcagacagcagttaagattcccccttaatcttcaaatcattgaagtaatgatgttttaatgagcgctagaactgcagaatgcttagaatgtagaaaataatagcatcctctatcaatggggagtgtcggcagggctaggtctgtgaagccgagggggcactccaattccaatgtagccaattggcaaatgcccaggagagagactctgcatctgggggacactgctgtcccagcatcccatagagacaatgaccttactgctctaaggtcactgaatataaggaagcaaaaagcggtacagacacccacgttcaagaacaaagttagtcacagtcatagagagggctgatctgcccagagtcttgccctttgggtactcccttcccaatctccctacccatgagatgggggaaagatgagaaatacttggaagcccttttaaaagccagcatgctgtgactggagctgatgcccagtagggaagagaaggcttttctacgattttttttaagtactctataaaataagagggagagagaaaaaaagaatatttctgatgtgaaaacctcctcttgtgaactttattttccaaaaacctaggagctgatgggacaattccagaaataaacacaaacattctcaggggaaacttaccctggatgagaaaaacagctcgagaaattaaattctgtccacccagggaagtaaaaataaacatgcagacagccctaaagacatgttttccagccgggcacatcggaacaatcagccagaaggcttctggagaaagaggaagcacaaacccacagaacagaactaccccaggcaccaagtgccacggagaagcaccccaaccccgtctccaaatcctcacaaggtgactggaaacagccaggcggaggaagccagacagctctgagtaatgaacctgtttacggaacaatcaaaatgaaaccggagggaacaggggctgtctctctgatgggccccgtgaatggcctcgtggcttggggaccgaggctggacagtggcaagggaaggctgactcctcaccatcctttccagggggctgggaatctgcgcggccttgtccaggagctcgctgtactccagctcctcgcagagcctctgcagcgtgttcaggggctcgttcagctccaccggcatggccaccttggacaggtccttcccgatgttgttcctcaggatgttccacaggctgatgttactgctgctcgggcagggcgccggcaggcacgttcttctccgggacttcgcttcccgaccactatcaaggacaggccctgaaagggaaagaggcctggttgtctctataaagcttttcattttattctattatttttaatccacgaataaaaccttacgtagcaagtagtcaatgttactattaaactcagttgttcagagtatggctgaagtcagaaaaccggcaaaagaattctgagcaattaaataccaaaaatgacacacactaaaacccatcgactttattcacagggaagaccttgaattgctcctcaaaacctagttcctcatagctcatacacacttagaataaaactggaaattggatttctatgcctatagttgcttattgtttataaaaacttgtaaactttttaaaaaatcactttaaattctggtaaaacaattgtgtttattacaggaaaactataaaggaaataatggtcttttcattgctccaccaccccaaaatagcagccatttatatattagagtatcttcatttcgtgttttctccatttgtgttgttcatactgtatacgtattttatattctgcttgttcagctaacagagtatttttccatattatttaaaatttttctaaaacatcagtttttgctcaatatcactaatcattagagaaatgcaaatcaaaaccacaatgagatatcatctcataccaatcagaatagcaattactaaaaagtcaaaaaataacatgctggtgaggctgcagagaaaagggaatacttatacactactggcgggaatgtaattagctcagccattgtggaaagcagtttggcaatttctcaaagaacttaaaacagaactgccactcaactcagcaatcccattactgactatatacccaaaggaatatatattgttctaccataaagacgcatgcacgtgtatgtttatcacagcactattcccaacagcaaagacatggaatcaatttaaatgcccatcaacagtagactagataaagaaaatgtggtacatatacaccatggaatactgtgcagccataaaaaagaatgggatcatagcctttgcagcaacatagatggagctggaggccgttaactaagcaaactaacacaggaagagaaaaccaaatgcatgttctcacttgtaaaggggtactaaacgttagttcacatgaacataaagaagggaaccatagacaccagggcctactggaatgtggagagtgggtggagggtgggtagtgggtgaggatcaaaaacctacctatttggtgctatgcttattaccttggtgatgaaataatctgtacagcaaccaccgtgacatgcaatttacctatagaacaaacctgcacatgtacccctgaacctaagagtttaataaatcatttttaaagactgtaaaatattttttgcctatatctttattttcttaggatatgaagaagcgggattactatgtcaacaactctgaatgttgttagacttctgattcacatgatcagactgcttttcaaaaaggctgcccccaacttccccatttatcggcagcagatgtgaacatccatctcctgaggcctcttcaggcttgtcattttcatttttaatttctgtcaaattgtcaggtggacagtgtaaccaccttgttctagcttacatttaaaagatttcctgtgtggtttggagtgctttcatgagcacttcttctttgctgaattgtctgccttcctatttatgtattaacaccatactctcttgttttatatttgttttacaattcaatccccacttggtatttacctttaaatttggcccatggagtattttgatgaatgaaacatattttaggtatgccaatctatcaatcttttccttcgtttcatgctctgaaattcctatcctccattgtgcctgttttcaaatgaaatctcttgcatattatttttatttatatatcaataaacatactttgttgatatatattttattaaacatatatatttaacatttacttattataaagccaatcactgaataaaggggctgctctgatgaacagaaacacatgaaaacagggccacactgtgcatctcatgttaatctaatcatccaattaacttctgaatttgttttgcttttttaaaattaattttttttgagacagagtcttggtctgttgcccaggctggagtacagtggcataatctggagtcactgcagcctctgcctcaccggctcaagcaatcttcctgcctcagcctcccaagtagctgggaccacagatgcacaccaacatgcctggctaattttttgtatttttgtagagatgagattttactatgttgccaaggctgatctcaaattcctgagctcaagtgatccacccacctcagcctcccaaagtcctgggattacaggcgtgagccaccacgcccagcctgttttagttgcttaatatgggtaaatacaacataggtaagtagctgcaaatggcagttttaaaattaattaattaaatattgagatagggtctttctcaacagggtcactcaggctggagtgcggtggtatgatcatagctcactgtaacctcgaactcccgggcctaaacaattgttccacctcagtctcctgagtagctcagactacagacatgctacaccacgcctggctagtttttgtatcttttttagagacaggatcttgctatgttgcgcaggctggtctcaaactcttggcctaaagcaatcctcctgcctcagcctcccaaagtgttgggattataggtgtgagccactgtgccttgcctgtagtcatttttgaaaacaatttttcatgtagtctcaaaaaattttctttgattacactaatctgaattttgaaagcatgctactccaccgccatcatcaccaccaatactactaacagctaacacatatcttgcattttattctgtgacaggcagtcttctaagcatttcacatgcattattcctacttatcctatgtaactaccacttgtggtaaacagtattattatccccatttcacagatgaagaaaatgaggcatagaggaagtaagtatctggtcccagaacacacaaccactgagtggcagagctggggctaaccaaggaagtctggtcccttaatctgtattcttaaacacttaacttccccaaagtacccagcatagagacaggtcctaatatgtgcccagcaacactgtggggaagaaattaataggaaacactctaaaaacctcatgtttactataaactcaaagaataacagtgtagcaagatcttggtcctaacacaggcaaaatgatgatatgaaatgtaaaggttatttctgtatccaatcttttcagtagagtattgatgcttagaaatataatctcccccaacccctgggaatgtctgtaaagaactaggggacacacatttctagtattcaaacactgacaaagaagaaaactgggttttgcccagtgtttgttcaagaaaggcaatgtagaccaggcaaggtggctcatgcctataatcccagcaatttcggaggctgaggcgggcagattacttgaggccaggagttcaagaccagcctggccaacatggtgaaaccctgtttctattaaaatacaaaaaattagctgggcatgatggtgcgtgcctgtaatcctagctactcgggaggctgaggcatgagaattgcttgaacccaggagacagaggttgcagtaaaccgagatcgcaccactgcactccagcctgggcgacagagtgagaccctgtcttcatacacaaaaaagggcaatgttagttagcattctcgcaacatgaatgtaaactacgacagaaccagctctaacctctaagcttttcctggctggtgtcaacacagcacagctgtggacttaggttctgaaccatgtcctctcttgacctttgacctctgaacattccattaactttgtgcttcctatggctccctctccatagactcaaagaaatggaggacttccacatttgtcaatcctcctcatctacagtgggagcaccactttagtgtgcatgctgtttgccaagggagtgatgtttcttcatttctctttcaacttgcctccttgtttttctagaaaaataagcagcacacaaacttgctccagtgtttttggccttcttcttcaaacccactggttcttagacctttccactaaggggttcatctcccaagaaacatttcaaacaaaataccaaccacgatgagcatcttacttctagcaggtgtgatactgaaaggatactcttccaaagcatggtaaaattacctgctttcttcccctatactgcggtcccccaaaaggtggctcttaaccattcagataacaattcatccgttcacacatacacactgagctgaggaacattgaaatatcaaaaaggtgcctggcatggtccctctcctttgtgaagatatgaaaataggtggtgctttgagtatccaatgcatagtgcagacaaacctagagactccaaggcagactgagtaccaagactgataagtgcttgatgctacgaggacccatgcagagaactgttcaggtgggcagattctttttaagggcaccttcctaaacaggccagtctgcttactgaagtcctaaatcagagctgtttggggggctagccagacactccagatattccacagttcgaactagcattatgaaatatctttcctgcccatcatttcccatcttgggatcaaccagtaataaagggtcatcttaggataccctgatgggtccgtccaagagatagccatttgttactttcaaatgtgttgttttgaagactctgaagctaaatgaccacctggatcatatcttttattatgtaagtcctatcacattcctaaattataaaaaccccctgatatctcagggcaaaaagccatattctaacatgtcctgagagagaacattagagtgcaaaagggatatctggcccaggcacggtggctcacgcctgtaatcccagcactctgggaggcagaggcaggtagatcacttgacgtcaggagttcaagaccagcctgggtaatatggtgaaacctcgtctccaccgaaaaatacaaaacttagctgggcatggtggtgcgtgcctgtattctccagttactccagaggctaaggcaggagaatcgctttaacccgggaggcagaggctgcagtgagctaagactgcaccattgtactccagcctggggacagaaagagactccatctcacaaaaaaaaaaaaaaaaaaaaaaaaaaaaaagatatgtgttacattttttatattcctataattggcatacactcactttataaaaataaaaatttgcataagcagacaaatttatttgaattaacacatctttcacatgtgggtgctagattataaaatcctagggggtggggtccatgtcttagttttcttacatactacttgctagagctctttgcttgtagcgggtcctctacacagctcacccttgaacaacacaggtttgaaccgcatcagtccactcgtatgcaggttttcttctgcctctgctacccttgagatagcaagaccaaccccttctcttcttcctcctcctcagcctactcaacatgaagatgaccaggatgatgacctttatgatgatccccttaacgaattgtaaatatgttttctgttctaatgatttttttaataaaattttctttcctctagcttactttattgtaagattacagcctcaaatacacataacacacaaaatatgtgttaatcgaatgttagtagttacatctttggggagtcaaaagttatacatggattttcatctgcatggggtatcagcaccttgaacccccatattgttcaagagtcaactatacaacttattagtattgtatgaaaatccaaacttttcagagattaaataatgtaaatcttacccaaggtctgtctctcattatctaaatcattactgagattatctaaggaaagattatcacttatgtcactgacatatgagtcatcatcagaaatctatgggaaagaagaaataacattcattagagttagaataaacaagagccagattttcataaaacccttactctaaatgatcaaacatgttgagtctcacagtacaaatactcttgggtactgttttcataaaggtccatataccaatctgccaaggaggtgttcacaacaaacacctgttcttaaaattcttacacattccgaattagttctcacaaggaaaacagcaagcaagctcaagactgttattataaagattcttattaattctgactgcatttttagaatttattagtgtttgagtagaagaagttacaatttgtctttgagctatttgtgtaaaaagtatcttctatgggaattaatacataaacaaaatgactaagtctgtatttaaggggtaacattattagtacacactgttaactataataactcttattcaggaaaggataatttttatgcatcaatttaaaacaaataatgctataaaccaatattacaataaccatattatcataaaaatataattatatattataaatcaatatgtcaaattccatgattaaaaaatatacgggatgctaatttccttctctatagtagacacattattaaataggtagaagtcaaaactattaacctgtacttgaaaagaagtatagcactttgagaggctgaggcggatggatcacttgaggctaggagttcgaggtcagcctggccaacatgcggaagcccatctctactaaaaatacaaaaattggctgggcatggggcgcacgcctgtattcccagatacttgggaggctgaagtacgagaattgcttgaacctgggaggcagaggttgcagtgagcagatatcacaccactgcactccagcctggccaacagaatgagactatgtctcaaaaaaaaaaaaaaaaaaaaaaaaaaagaggccaggcacagtggctcacgcctgtaatcccagcactttgggtggctgaggcaggcggatcacctgaagtcaggagtacgagtttgagaccagcgtggccaacatggtgaaaccctggtctctactaaaaacacaaaaattagccagacacggtggcacgtgcctgtagtcccagctacctggtaggctgaggctggagaatcacttgaacctgggagccggaggttgcagtgagctgagattgcaccactgcacttcagcctggacaacagagcgaggctctgtttaaaaaaaaaaaaaagtataacaaatttaacatatcaagttacagaaatgagaaaatatccaatgctctctacttttactttttcttctcacatatagtatcattttatactttttgggtatgagttatgggagaactctcagaacataatgactacaaagggcaactgagtttagtgtttctgatgatggattatttactgaacagattaatcagcaaagcaacaagagagatttttgaggcaccatactgtaaacattgctcaaacctcgttttctgaagagcttggagataacagaacttcctgagcatcaaaaaactcagaaagggagtcagtgatggagagtctactttcattagaaagctgatgaactagagctcggttttcatctctggagttttcctatttgaagaacaaaaccaaaaatgtatacatttaaaaacattctcaagagaaagaaaataaatgatttagttgtacaatacacaaggtcacaggcccatgcaaataagcaactcaaagcagaagtcagctccaacactgagatgcgagcctcatgcaaaacacaaaagttctcccccaatatgggcacctcacttacaggcactatcacttctcacacacatgcaacaaatcacaaggcaaaaaacaactgtccaggtcactctttgttccatttaaaaggggaaaaattccagtgctctctgaatcatatcctcttattcgctaccactgctggatgtttctttttatactaaaatctcctctgcattgcactgaattcatgtccttgcatggctggttcagagcaacatagctttcttctgcccctatgctctctgagggaacaatatgctgcttttgaggtgtcccttgacaaatacacagtgtgttttggtccagaagcaccctggtggcagatcatttactattcatggatgaatgatgtaagttctctttgtctgtctctttccacctacaatgactgcaaggaaaggaagtccccagtcctctttataagcctctgtacaaataacacaacagaacatcattgttttcttatctcgcatgaccctccattctccactccactgggtctggactttccctctggggaggacttaagtcctgagctggccatggcaggatataacaatgaaccagacaaggtttgtggactgaatgaatggtgagagaacgcatccaacgcacatcagaccaggcctgtggaatagacaaagtgctggcaaagtggagagactgattctgattagggagattttgtttgaggagggcttcatagaagtggcacttgaggaaaaagaacagattcaggacaggatgatttgatttctttcaatcagagtagacaggtagtagtaaaaccactcgtattttttattgggctaacaaaggagttgcttccacatcatccagaataatttggggaaaaggcagattatatcttgcccagaaattgtctgaattcaggatatacccctcagtctcatagggaggggatgctatgacaggagggccacagcagattttcgtaattaataaaaggcaagtggtccctttacaaattgcttgcttcagtttattaatatgtatctacaaactgttgaaatagatatccctttcctaaataaggcatctgcccaaggtattaacaatcctacccattttaatacccatgtagccttctgaaaaccaagcctcttctctaccctaacaaagagatcactttagaatctataagtatcacagctgttaacttcaaggaaaaggtctctctcctcaaaagagccaggcataaagctattgagcttgaaaacatcgtaaggaatagcttcaacactcactcaaacaagagaatagtcctgtgtcttccgtgtgctcctgccacaaaagatgctcatcatttatttacttgttctactcattaatttattactagtcactcctgccatctctgtatcttcctcctcctagactgatgggtccaaagatttcctggctgaccaacactgaaaataatattcctagcccctagccctttctggcatcttcttatatgtactgtaaactcaccagcactgctgcaccccaagtctacagcatggtgccttaaacaactcaggacctcatttgctaaaatattaacccagtcagttcaattcagtaatttcctttcacatatgtaatgcatgactggttgcttatctattgtttgcattacaaaaagttaaatcaagcgtggccaacctacagcccgggcgccacatatggcccaggatggctttgaatgtggcccaacacaaatttgtaaactttgttaaaatattatgagattttttttgtgattttttttttttctggctcatcagctatcattagtgttagtgtatcttatgtgtagcccacaacaattcttcttcttccaatgtggcctagagaagccaaaagattggaaacccctaaattaaataaacagagaaaagggagggaaaggaacattcatagctcacactataacaaccactacaagcattctgacacatttcttgtgcagtaattgtaatcatgctattttcatatctctatgtatgtaattttataaagttcgcccaaataacattgcaagatagttttttttcaaaattaaactgtattctgaaaataaaaataggtattcaaaatagaaaattttaaaaaagcaaattaaataaatatcacttcaagtcccattgaagtcgatatgaatgtggaagtggacgtggcccctattaacttgctggtattttcatattaaaatatctgtgtacaaattttattttgaaaaactgggataaacagtctacatattgtctgctccattcactaaccattatattgttaatattttcccagaccattcaaaattctttgagacagtgaactgtaattgataaatattttattatatagtgtcacagagtaataataaaattaagaatgtttacagatttgcgaaaatggtttagtatgtttgtaaatatgtctttgcttgtatcatgttatttctcagaatcaatttttcaaagaattattaataaccttcaaggcaaggcaaaatatatattacctaattacaccaacaagtaaggaaacctctgttttttctacattaagggtactgcataccataatttagaaaacttttgagctaatctaattgttttaattttcattaggctgaatagtttttcctttttaaaaaacaagcttgtagagatgttattctagggagaggctggatgaaggctgcatgggacctccctctgcatttctttgtactttcctgtgaatttacaaatattgcaaaataagtaaaaaaaaaaaaaaaaaaaaaaaaaaaaaagaaaacccatacctatctgtatttgtgtgtatgtgtgtgtgtgtgtatgtgtgtgtgtgtgaattatggcctttttccatttacttgttaaagttttaagttacttgatattatttgtttattggttacatatgaaaaacattatcattgatttagcattatctcagtctgtcaatttcactgaaaatatttttcccagtctattatttgccttattgttttgacacacatcactttttcctaaaaaaaaaaaaaaaatagatctaatcaacattccttttgcaatttttttctattgcaacccaatttagaaaatcttccctactctagcagtttgataaatatttacattaatatttttcagtttgaatttttatatttaacttgaatttgcttttgattcatttaacatgcaatgagaagatttaaacttctttttaaattgctttcagcagggcatggtgggtagtgagtgcctataatcccagctacttgggaggccaaagcaggaggatggcttgagcccaagagttcaaggtcaggctgggcagcatagtaagactgtctccaaaataatggtaattaattataataatgtaataaatttctttgagctgtgccaacctaatttattgaataatccacccctttcccattggcttttgatgcctttttgaaccataatctttatttcttttatatacaaaataacatctatgcttgagagagttattctgtcccattcttacccatcatcccttattttaactgctggagcttgaatgagtgttttattttctggcttggcataccgttcttcattatatagcagtgtatactattgagaaaaggattgctttggcctcgttagatgtgaatttaaatctcagctctgtctattacaagctgtatgtctggaggaagttatttaacctctctgagctttagttctcttgtttctcaaatgaaactatcaccacctacttcatagagtcatggttaggattttgtgaggtaatgtattcaaatgcatgccgatatagcaaacagacattaaaagaattaagttcccttctctttcagacttttctttaaaagttttggccttttttagtctcttaaatggacattggatgtagtatggtgttacctcccaaagtcacttgccctttcatttggaatctaaaataatcaaagaactgataacttgataatattaaatcttcacattcaggaatataaaacaggagaacttggtaggctgtgggggtaatttctgatattaaaaaaggtgggcattttagaattcaattagccaggcccaacaccaaagatgggtaatacgtgtggctaaagaaaaggtaacgaggccgggcgcagtggctcatgcctttaatcccagcactttgggaggccgaggtgggtggatcacaaggtcaggagatcgagaccatcctggctaacatggtgaaaccctgtctctactaaaaatacaaaaattagctgggcatggtggcaggcgcctgtagccccagctgctgggaaggctgaggcagaatggcgtgaacccgggaggcggagctggcagtgagccgaaaaggtgccactgcactccagcctgggcgacagagcgagactctgtctcaaaaaaaaaaaaaaaaaaagaaagaaagaaaaggaaacgaagtgagcaaagaaagtgagagttctaaaaggagagcaccttgggctgaccccattggtggagactgtcatttcccaatagagtaccagaggtaaccgggagttaccgaaaaaaaattaactggagtcaagttttcagtctgggaggccattttcacttactttcctacttatgtcctgaaggcaacaataactttacctttgctgggaaagtaagcctgagtcactccatgataaaagggataaaataagggaaacagaaaatttctgaaagaggaaatagataaggtgacaactgcatcactgattcaagactcaagaaggctgttttggaaggtgtgcatttgaaggatgttattgttacctctcaaggacagtgtatagcatttcagctttcaggtatgctacttttaagatcagtttaaaatatgcattttaaatatatagtttaaaaacatgtattttaaaagacttgtgattttggtttcctttccaaaacacaaatagttccaagtagacatgccaagcataaattcataaaagcataaatgaacgttatgtatttaactacctgttaaatcagtaaattgtgataatactatttaaaaggtaaatactgtctgaaaacatgcacaaactccagataataccatagtacatggcagctggtcagtaatggctgatcctggccatgactgggtcctgtttttagccaatgtgcagactcaaaagagggcctgcccaggcctaaggtcaaggcgccgtaagtaatgtttaggtgctcaatgctgcaggtgacagtttaggtctgggctaacataactgaaaagtgacctcttgtgggtagcgcttctataaaagaatgtcatacttaaccactagcatgtgcctcagaagtagtaagagacccacaagcttctgccagacagagggtgaggctcatgggagtggatgggcctgtccacacatggcaccatcttgtctccaaatgggttcggtgcccggagccctacagtccatgtactgactgacttcagcctcaactcgcctcaccaccccgcacaatggcttcccaaggagtgaaggtgtgtgaggggtttgttttctctgaggacagaaaaagaaggacgaaacactatgattaaacattacaaacttcttttaaaaacttacataaacacacacctcttgtctattacctgccttacattttttattttaagtgtactcagtctaattcatttgttaataaaaatttagcatatctgaagcaggcatttaatataaaaaatagcttaaaaacagtttttactttcattactctttcctacttattttttgagtaacctacttgtacttttctgaaatttctcattttaaacatgcaaagactattttggataaacatccctagtcttgaagaaagacttttttttaacatacttttaactgaccaagagacactttaattgtaatgaagtattttttttccctcagagtgtacagccgcattctataaaagaaaaagaaaatcacagaaaagggagaagggaacagccacagagaaagggttagaggggaaggaggctggcagggaaccaagatactgcaggtcagagaaacgtaggtttcttcagtagtaacaagagaaaatgtttatctctctatagttcccactccagtaccactagtgaaaggggtgacatttaggagcgaaacagaaatataaaaaaaaaagagagttctggggaaggaagcagtttaaaaatgcaattagcagcatacgctcaagaaagcgtttgagcccgagaccccagtccatgacctagctgtggccagcacccagaggaggagggcagagaggtggacagcacccatgaggggaagcagggaggtcgtgcaatgggacagatggtatcacgggagcgggcggcagctggggagacattaccagacgagaaacctacccacctctgccagattgtcacccgacttggcgacagcgggggagtcgaggagcagagactcggcatggattctgcgtaagcgttctttaagatctgtgttttgtgctagggcctggaacatgttaaaatagtggggctctgttaataaatggatgtttcagaaaagcacagcagtgggccctgcaggagcgatctctaagagcttgatgaaactcttagtgacgtggtctgacagcgcactttctggactttttccttgaatgctctccaagaggatactggttctgagatgcctgggagatgacaaacctgggctctggaaatgatgctctttttcttttctcattccagacatggagggagggttggtaagtgcaacagagagggaagtcacagacactgtcggcttctgttaagaccagtggttccacagcatctcctcctcctccccaactgtctggagtctctttggccaaatcccttcctaaggaatccaggcttctatctgctttgaagaatatgctggccccatcccttatgattggacatatttcaatgttacttaattatcatacccattgaatcagattttagaaagtgtgctggaggccgggcaaggtggctcacacctgtaattccagcactttgggaggtggaggcgggcagattacttgaggtcaggagtttgagaacagcctggccaacatggtgaaaccccatctctaccaaaaaatgcaaaaattagttgggcatggtggcacacacctgtagtcccagctacttgggaggctgaggtgggagaattgcttgaacctgggaggctgacagatgttgcagcgagctgagattgcggcctgggtgagagtgagaccctgtctcacgaaaaaaaaaaaaagaaataaagaaagtgtgctgtgtgctgggaagtaggactttgtgaaagattaattttactcttttccaatatgggtattgattgttctattcattcttcaggactaaggcaatctatttcaaaaaagaaatgagtaagcctcacttacctgcataagggcttaaggaccatggctctgggaatgggtaaatgtgagatgaaaagcaaatctgagactatgcccccaggcctcctttatatttccctgggcagggatcattccttatctcaacctctcaactaggaggaaagtggctgaaaggtaaaggaagctgtttccttcacgctgatactcctgtgcacttcatgaccaactcttctccaatggtctgtctgtggaagggggacaagttctcctgactgtcttcccagacactcacacgatcagctccacgggtgctcgcatgcagattcagcctatatgtctgtctttctgactcttttctaagaagctctgagccttttgcatccaccagggcctgcaggaccgacctgctgaaagcatagaaggatgtggtactgcctaatcctctacctggatctccaacagggatgctggctttgtttttcagtccctgcagagcatatgggttatttgaaaatccttgaggaccacttaagaaaaactgcacaagagctaagatcacacagccacatataacagtctctctggagcactaactttattctggccaatgacagaggtagggaggctagaatcttagtacagcctgaaaattgtgctattttattagtttttctttcctttgtaagccacaggcagaagaagaaaacatggcaacactgtgcatacagcaccgacatacccattctgataactctgatatggttctaaaaattttattttcaaaaaacaagtcttaaaccccaattgtgaatccaagccaaaaaggaaagaaaggatcattcggttttatctgaagtttccaaaatcgtgaatatgggtgagaatgaattccttagtgaaggtgagaacagccttggcctaggataccacagccaaataggtctcagtggccaaacaggcagattgacaagatgaggccaggcctctgtgggaggaggcagggagaggaagatcatggggagagggaccttggaagcccatcagagataccttttgtaaatgcactaaaagctagcttaatgagaacaataagaaagttagggaaaaaaaacaaaaacactttgcttctgcttctctcaaaccaaaatggcaccagtgtatggctgtcttgtacaataaaaagggggcgattctatctgtgaccttaagacaacgttaagactcttctttatatatggagcaagccaatgttatttttaatttcttttgaagatagcatacttgtaatggtccatcagtgaatactccttacatattctacaacaactatatgtgctactggcagaggatttatcactaacattatattaagagcatcacttttcttggcaatacgataaatagaaaatatgaatcaacattttctagttctctcaatgcctgtgttggcttctggttacaagatcctaaaatttatctcccctacctgacctgaaatagaaaattcagtattgcttcagatggcaatttcatatgtgcacacactctttctctttctaaagtaggaattccaaagtacaagaaaagagtaaaagcaaatcagtatgctatttcaaaagttctctagcctcctgatagattcagggtaaaaaaaaaaaaacgagataactttattcaaatagaggtaggacatggcactttaatggagcctaactattctgaggaattaattgaaactgatgaaaaaaggagagagaatgagtgacaatggctgagaatcatttgggaccctgtcagtgattttcctgttactatgaaggtatagtgattgcctgacaggcactttcatgtgactcatctctttgtagccacagtaggggggcagggcagggaagctaaatgtcttgtactatcccatcaaacaaaatagctctcatgtctttgaaagagtggtaaacaggatcagtgctttgcaatagggaagataagagcatgaattggaaatttcactctgccacctgtcatttggaaagtaaggctaagcttgtggtgtctcatgcccataaaatttcctccaaactgtcagattttgtaagcattaacagaaaaatgtctgtaagacacgcacacatacacacaaaaacgtacaataaaaatgttagagaaacaaaaaaattaagatcagtcagaggaaaccaaacttaaagaaggtatcacttaataaaatactagctattaagacttggataggtaagttttggtgtttcaaataagcagatttgatgaaaggttagaatataatttggataatttggttttctcctgaattttcaacataatcatggaaatagaaattacaaaccattcatgagcctggacacatctcaggcattcctggaggcagacatgtaacttacggatgacagggcgttcttcagaccaatgacctgagcagacggggaggaggaggcatcctgctccatcagctgcttcagtttctctctctccgctgacatgatattaaaagctgaccttaaagtgaagtaaactatagagatagaatcattataaaaaggaataaggaggcataattaaaaacaaaatacagaaaaaaacatatctcttataaaagaaacaagcaaagtaacagccctgaatattttgagtatagcaaatgtacattctaccttgacttttaaaaaacacatttgccatgtagaacacgctaatgtaaactaaggcctctggatgatgatgtgtccacgtaggttcattgactgtaagagatgcagtactctggtgtgggatgctgatggcggggggacggtgcctacatgggagcagggggcttataaaagctctgcacttttggttcaattttgctatggacctaaaactgctagaaaaaattaagtctattaaaattaactcccattcacacacatctggcaattctaaggcccctatccactgtaatgtctcatgactttatgacttatcatcaggattttttgacacttgcactttgcttctagatcctcagtgatcagtgttttgttttgtttttgtatccccaaagactggaaagggttaaaaacaaagcttattggttttccaggggaaaatgttaacactacagcagaaaaattagacagcaccttaatcaggtgatcaaaattaactattggtgagagtcaggtggaccatgtgcctctaggtaaaataggctgaaaaagacacaacatctcctttggtgtatgccagccagggctatgtaatctgaatttgatcatgagcaaacatcagacaaccccagaatgagaaacattttatttttacaagttggcctatactattcaaaagtgtcaatttgacgaaagagaaagaaaggctgaggaactgttcccaattaaaggaggcaaaagaggaatgacaatgaaactgactcaaggggcaacatggtactaaaggcattattgggataactgacagcatttgaatatgggaggtagaatagataaaagttgcttcaatgctgtatttcctgaatttgattactatactgtggttatataacagagtattcctattttatatactaaagtataaagccataaagaacaacacgaggtatgaattctactctcaaatggttccaaaaagtgaaagcgtgtgtgtgtagagagtgataaaataaatgtggcaaatatttaaaacgaagtatttgggtaaagggtatacagaagttctctgtataattcttgcaacttttctgtaagtttgtaattgtttcaaaacaaagtcttactgtctaccttcttgcttgttagcccttccagctgcaggacccagaatcccccagctctaaccctggcattcagctactctgttccctagtgagccctcaggtacaatgagggcttagccactatggcctccaatgcctgaactgaagttttaaaaaacattaacacatacagcacacacacacacacaaatcattattcattaggttttgatcacatcatgtacaaattacttcctagggatgaggaagctgttatctaaattactgatcgtggctatcacatttgaatattatctttccaatctcctttataatattttgttttagaagagcaggaagactgaagagactcagacacatgtcttctcaaatgacctagcacattactgaattccacagggctgcatttttagaggtattgttattcaagagtgggctatttagtaacacagaaactaaataggcattattgacttacttcatttaatagcaaggaggacaactaaacctctctatatgttgttgctgaacttgtctgaggttgtggcatttagtgatggacctgaaacatcttaacaaagtcacaacaatttgtacacacacacacgcacacacacacacacacacacacacacacacacacaaacacacacaatggtgctgcctctgccaacagaagatgggggtcaaatggaactaaaattttctaacgacgcctatgaaacacacttagctccttgctttaaacaatttaattgagcaaaataatgggcaggacaacagagtaatcaacagctggggctccaccatcagccctggattcttccccactccatcacctattaactccatgaccttggatgagtaaatgatgtgcctgaaccctggtttccacatttgtaaatggggataataataacttttactttaaatggttgtcatgaggattgaatgagagagggaatgcaggtaaagcacataacacaatgcgtggtatgtaataaataacaaatgttactgcaatatcatagtgataccgatgaaggagacacatgaggatgaaagtgatggtgactgcagtctcttgaaatgttggcagcagctctagatgatgctttactcttttgccaggaaaatgcttgtaaataactgcacacagggtagaaattctaggaatgaggggttggccagaatctatggagctgtaggagaacagccttgggaggagagcagcaagccacacagttacggactgcatcctatgtcctattagataggcactatgcccctcccctgcctgccacacacacaggatgcccatggccatctcagtgggtcccctggggagctacctctcactgtcttgtttattgctccaaataaaataaatgtggcactcagctagccgccactttccaaatcaattcctctggcttccaggtgacctacagaaaaacaaggctttccaccaaatgagaagagtcctacataaattttaaaaactggcagaatatacaatatttggttcaaaatgtacagctgacaagattgcaataggtgtaagataagcagaaagaaactcatatagtcattatattttattgtaaggaataaaacgcttcctaaatcatctgaaaaaagggtttggaagactagatccctgtgtactaaatttcttaaatgactatcagggcccactcaggacattaaaatagtcattcacagccacctaatgatctgccacacacagggcaatgatcagaggttgctcatgagagaccacatttatattaattgtttaagacacaggatcccaaaagtcaggaacactctctgtgataggagtgctttcttacttatttctaacatgaatctaagcttactagagacaaataaacagctttaaaaaatagaagattcaaatgagtgcatcacatctatggttacctgacaataaataaagccacacagaaaatcttagatgctcagagattaccaaagccacccaccccacaacacgaccaactcttcacatctccagcttccccgccaaatggtctgctggcccacgcttgtcagagcacttgctatctcctaaaatggtacattctgctctgggacttagaaagtccttcctgctgctaagacatttgcctcagtgtctcttcactgtcaaagaggaggtatttcctctttcattgagtgttcaaatatcggaaggcaactgtggcatctgcgatgattcatctctttcccaaactgtcattagccatttctcagatacccttcctggactatgagaggcaggcacaggttgagtttttgactgtaagaagtcataagttgcatctacagaatggaacatcataagcgtcgtacaagtgactcttggtggtcactacctttctgtttctaaggcttccatgctgttcttttattgagttagtacagtgagactataatagatggaatgtttggatagtgagagtcaatactctcactatcaatgtatctcaatttatctgagctctacttcttaacatgctccttctttagcagtttctcagcatcaggaaagaataagatcttggagaaagtagttatgaatgccatgggtaccgctctagaaagcaatgtggtacaggagaaagaaattctctaataaggccagcctgaagttaaattctacctctaacacttagttgcagctgccatttatattttggacaattatattcaggatttgtccaaaatacgtttctacatctgtacatgtagatgatgggcacatctgaggagcgctttaagcaatgagaaaacctactatcacagagcacctaacaaacagtgagactcatttttccccctttttaattggaaaccaaattttaggtgaattttctttgaaatgttaacattcctaatatatctgggacactctgatcttctgtaatctgcagcagtttcaaacctcacaggatgcccatgattttaaaattctttttaacccatattccatccaaattgatttagatacattaggtaactttactaaatggtcctacttatgaatctaattgctcagcacatttatgctgaattctaatttatgaacaataaatgacttggctttttgttcagtcatatatctcttttagctttttaatctatgaaagaggtatcattgtaacacacttggctttttattcaatgcttccataagctgaaaatggttcagaaaatgaccactcaatacttactactcaacatagggaaagaatccagaaagaaaagaataggtaaatacagttttgactttgttctatgtagctttcacatttgtgaatgaggatttccttcacttgtaggaaaagtgtccctaaaacatcatttgcttcccttccaagtcaaagaacacagatatccgcttccattcagaacacctgaccctagccctgtcttgttccttgctttgccatcctaaatctcctcaccaagtttggtcatttctgtttctgctaacagaacactctctcagaaagccttcttgtaacaataagcaatagtagggactctttctattcagtgtaaaataatcaaagaaaataactacagattttgagaaccaaaagagtcaggacaactactatacgacatttaacaggctatcaagggccagagaggttaataaatgaagtcaaatttccacagctagtcagtaacagaggtggcctacttagccagtacagagggagctccaaaaaggcttattatttacaatgttttttaaagtatgtttctcagaaacttaaattccaggatgttaatagctgttgggaataggggggaagattcccaaataatattgaaagtcactgagttaaacaaagccaacagatttttgtgttgttttttgctgcaggacttctcagggcctttactatttactgttcttatgtaaatccaaaggagaccatagtcagcagtgttttccaaacatttttaatcatgaagtttttgtttcatttttagaagtactttatgggtaaagtgttccataaaacatattttgggaaatgtaaaagctaatatatgcaacaaaaattacttaagacttttaggtttcaatatatttcattctctgcttatatgtgtgtgaacatccacacaaagccagaaacataagccaacaactggttcaacaatatgccataaaaatcaaactcacagtctataatatagaataaggacttttaaaactagcatgggtgtattttggttccctaccatttgatctacaaaaccaggagaattcagatgcatttaacaaggtgaaggtcgcagagactatgttacatcactggaattcttgcctttagttcagctgctttggaattgtagtcaacagaatagtgatgcagtcgagaaagtacaatagatactgtcagtaacaaaacgaggtttacacaggaagaaaggtcaagatgcttcgagtttgaatgtatggaagtgagaaggcatgcaaggtcacaggacttagtacaaacctgagagctgtctttattctctgaggcccccaaattacaatctgtgcaagagactccctgaaccaggaaaaggaagatctttccctctctgcaagtgtactgtaaaaccacaggaatgaaacaccttgttaggctccctgtggaatttgttgtctgtaagcccacagggctcaggcaactgttgaataagtgcattggacctttctccaggacaaaccttggcccagtctaggtatgtggcagctctgcagccagcaggttttcacaaagtgggaaagacagaactgctggatggggcccattacagactttcaacaaggtggagacctctgcaggaggactggatcaatggatccactcagtatggcaacctttgtcctgctgaggaggcagcttcttcaatggaggtgaaactcaggacatttcctctgtgtagggaggcattatcttctcattgtttaaaagtttgtattattaaaaagtaacaatgttttataggaatttcctcccacaaaacttaagatgccctaattgcaactgattattttaattcttcaaattctttgaagatcctttaagggtgggccaggtaactcttgccatttcacggatgaactgcacaacaaaacactcataacagtctaatggtaattaggacaagcattccaggtagcaatctgtataaaggatgaaatggtttccttataacccacctcatatccaacatgttttaaatttagagggtaagggaagagagagctgaaggaatcagtaatgtacgaaacaaaaatacgaagtaggaaaggaaggcaatagagggaatatcttctctcttcccatattacacactgccctcccactgaaaaattttaaatccattttctctttaagaaataatatatgaaaattgaaaaaaaagttaagcagaaagataaataagcacttagaactccagcctccatcacttaaatgtttgtatatatccttccagactttttagtatacctatatatgcccgaaataggatcatacctatatattgttttgtaaccttacatttttactttacattttatgctgaggacatctttctacaactataaaaaataacgctggccactccatctgtaagagcagagaaataccaggtaaggattatggactctggggtcaaacaggtgagaattcaagtctcatgctggctgctttgtaaccatgtgaccctcaggaagctgttattttatctaagtctcaagtttcttatttatgcaatagagatcataatgatacctacttcgcaggctgcagctagaattaaaataatgcacgtaaagtaattagcaaatacctgacgtgacagttatgtgctcgatgttaagtagctctcattattattattagtgagtattctattatattacgtttttgaaaaaattcaatcccctattgtttggcatttagattatttctatttttttaaccttttattttgaaatcattattgacttacaggtaattgcaaaatagtaaagtcccacataccctatacccagtttctcccagtagttacatcttacacatctatggtacaatataaaaacgtgggagttgacattagtataatctacagattttattcagatttcaccagatttacattcactgatctgtttgtatgtgtgtgggtataagtaaatgcaattttatcacatgtccacattcctgtaaccagcaccacaatcaggatacagaatttttcatcactacaagatcccttgtgctacccctttataatcacactcccctttacttcctccatctccataattatatcatttcaaaacatttatgtaagtggaaccctacagatatggtttggctgtgtccccacccaaatcttatcttgaattatagctcccataattcccatgtgttatgggagggactcagtgaaggataattgaatcacgggggtggcttcccaaatactgttcttgtggtagtaaataagtctcatgagatctgatggttttataaggggtttcccttttcacttagctttaattctctcttgcctgccaccatgtaagacatgcttttcgtcatctgccatgattgtgaggcctccccagccacatggaactgtgagtccattaaacctctttttctttataaattacccagtttcgggtatgtctttatcagcagcatgaaaatggagtaatacacctatactatgtaatgttttgagattggttattttctgtcagcataacgtccctgagatccatccaagttgctatgtatatcaatagtttgttccttggtattgctgaggagtattccattgtatggatgtaccacagtttgtttaaccattcatctgttgaaaaccacttgagtttgtttccagtctttggccaatacaaataaacttgctttgaacatgggtatagatttgtgtgtggacataaattttcatttatctggaacaaatgctcagaaatgagtgttgggttgcatggtaaatgcatgtttaattttatacaacactgccaaactgttttccagagtggctacaccattttacatagctacaagcaatgtatgacagattaaatttatatgcattttcaccagcatttgatactatatttccttttaactttggctcttctaataggtgtgtagtgatatctcatcatggctttaatctgcattttcctaatggctaatgatgttgaatacctatttctaatttttgatgtgacaatgcaaaatggatactttgtttggataaattctaagttaattcctacaatgaattcttcaaagtggaattgctagataggcagattttaaaaatagtgagaaaataatatcatattgccctccagaaaattaccaatttacactcccaccaacatcacatgaattgctcagcttttaaagtactaactctctctcattgtctcccccacaaggttaaaaagaaagttcttgccaatacattctccactactagggaaataaaataaagattaggtttccctaaatcttaatagagcagaaaatgaaccaactaagatactctctctaaggacatctcacattcagacatgcacttaacattttcatcaaacacattaggaagaaagaaaactcatttacctttatgggcaatatgacacagatcttcttgcattttagaaaactctgatgaggtttcagagccatcagaataatttttctcttctccaaaatctagtgttgacaaattaggattggaggagtgtagtcttactgggccagaaaaaggtttcgggacctgaagtaacaccaaagggagatatttcttttcagatgcagattgcttagaatatttacttgattctaagattgaaacatggtaatacaaatacaaaacattttataggtaggtcttttttttttttttttgggggggatggagtctcgctctgccacccaggctggagtgcagtggcacaatctccgctcactgcaagctccacctcccgagttcacagcattctcctgcctcagcctcccaagtagctgggactacaggcgcccgccaccacgcccggctaattttttgtatttttagtagagacggggtttcaccgtgttagccaggatggtctcgatctcctgaccttgtgttctgcccgcctcagccttccaaagtgctgggattacaggcgtgagccaccgcgcccagcctaggtaggtctttctactgagtgataacttattttaaaaaatgagaactcaagacaacactttccacagaaacttgcttcttgtgagctaaaaatgggtgagaaatcacatattcttttggaaatgatagaagcattaaagctataggttgaaaatgacagctaaagctgccaggctttctcatttatactcaattccttcctcctggcaataatcatccatgtatccaggcggttagtaatggataggtttaaaatgcttttctttgcacctagggcttctacaaaacaaatgaccttcatttgtacatggaacattctttacttccaaagtgcttatcttcagtccataaactactttgaaccaaagagtgtacacaagtgtatcaggtgacctaaccaaaagcttgagatttatgttgattctaaaactgttgcaattaatatgcaacagttaagctgcaaatcttggcctgtggcttagctgtgcattgggaaagctcctagcatgacacagtgaatcctggatgagggattgggagtttggagataagaggccaaggagaatctacaccatgtcctgtgcccagagaatcaggcctgtgggcttagagggatgacaaatccatggagcatcagcggaagacacaggtcacagcacacagcaactgcagccacaaaacaaggcacaaacacaagcagggaagagcacaggcaggctcaacagtgaaggtggggaaaccaaaagccctagaaatggcagcagtccctgcgacctcacaccctttttcccttagaaaaaattctctcccttgcccacgatccattatgtgcttatcctagcacccagataatctaagtgattcaattcatctcgctacagaggacactggaaagaacaactacagaatattcactcatctattctcctagctgagtcaaggtagctgctggcacacggcatgcagagcagggccaatgaagaaaccagtctgtcaggggaagcaatggttacctgcagtgttcctttagcatctttgccaatagctctggaccgccacctcctgtgcgatcttttttcctttttgggactttcaaaagatccaccctttgtttcaaaacaggaaagagagcacagacagtaaagtccaccaaaccgacaaggataaatgcatagcaaagtgaccacctccatccccttgactttggctgaagcaactgaccacagcatcccactgttagtgaaaggctgggaggagaaaggaaagcagaagagggccagaatgtcaacagaagaggagtccggctcacctggatggcgttgatagctggtgccgagtatgtccgatgcaggacgtccatgctttgcaggagctggctcatttctaccaggtaggcatgacagtgcgccaggtctgtgggggaaaagaggacagtgctcacaatgctccactagcaagagggatcactgtgctgtccccatgccagctacttttccttatttatctgtagttgattttttttttcatctgtaagggttggaaattttacttccttttttacaggaaaggctgtagactctagtggttaagggcatgaatcttgagaaccaggctgcttcagtttgaatccacttaatgaactgtaactattgagaaaattgcaaaactgcatgcctcaacttcctcatcagaaagatggggataattatacatcacatgacaagagagttgtgagaattaaatgagttgatattgcacagttcttagaagagtgtttggcacagagtaagaactaaataaatcaaccatcatcatcatcatcatcaccaacttaaatcctgtagtaatatgctgacaccatccacttgtcaggacccaatgcacattaataaaactaaaatgaaagttgtactggtctctaaggaaaactttgtcaatcatggacctgcctgaggaccataataagcctcttgcacatggacctgagaggacataagaggactctccaaccagatcccagtcgctaactcaaaagatagtccatatttgctgttcactgaatgctgatggatgtttctgctgaagaatacaggcccaaatgccttaggctagaggctctcacactttgatatcatcagaaccacctggagaccttgttaaaccacagctcgttgggctccacccctagttttttattccatacatctgggttgagcctgacaatgtgcattgctgataagttcccgggtggacgctgctgctccagagacaaggcttcagggactgctttgacaagctgtcacttggtaaagttcatgagtgatatttattagaggggtaaagcctacatggtcccaagggtgatattacctgtattcaacaagagataatgcaattttcaaggctgccacctggtatctttctctaatagtggttctcaatcatggctacagtttcaaatcagttggagaaatcttttaaattatatatgcctaaatcccacccccagacaattcaatcagagcactcccagtcccgctgtggatcttttcggtttttagttccctaagtcagtcttagctaattaaggttgagaatgctgagtttccttatggcaggcgccttatcaaaatcacttggggaactttggaaaattagtgatatcagggccctacctcagaccaatttaaagagattatttgagacagaggactgggaatgggtattactgcattttaaaagccctctgggtgattctaatgtgcagtcagggtacagaacacctacatcgtgaagatctccatctgatcactccctcacctctagcacaatgattctcaatctttcttggatgtgtgtcagactctgcccttggagactgacttataggcccatgtggaaatcaggcatcagtatcaggcatcaatactgaaggaacagaagaagaaacctgtctgcatgtacagccaggtgaagatgcaaagatctgcaaggagagtgtcttttgttgatgatgggtgcaacctttacaagcaaaatatggaagggaatgtggacaagcataggggaaggacacaaatgaatctgaagtgtaaacatcaaaccagtatcatctaatagccacaacagaaagcagacgtttcaagtcactctacctttggagcatttttccatgtcctctgaagactgtaaccataatggaactcgtgtctcaccaccacaagaaaatgatacattgcttccagtttgaaataaattctgctttgatatactgctacgctgttccacggatgacaaaagcacattgtaaatggaaacagagcccattggggacatgttaagacaaaggataacagagtgggctagtcactaatggacaccatctgcctataatgaggaagaagcttctagcaaagtactaagacctctggctatcaccccggcttggccataccgtgctatgatacgacatgccttgaatggtggacctaattttcttcttttatcaaatattaataacatcaaaataataatataaatgtttggaaatattttgcaatcctgcatagctatatgcatacctactgtagtttacaaccagaaaaggaaaccaaactcaaaccagtcaggataaagctagttcattcagagatgctaaattcctccttattcttcagtcactgtccgcccccgccccaactaatagatgcttgtctggtcttggttctgactcagtgggcaaacagactaattaaataccagcccaagcctaccctgcttgtccccgaaaacttttccttcttcggactcagctcccaagacaggactccatgaaacaaagccaccccgttctcagattcattattggcaaaacactcattaccttcctacttgaaatggagtcaaacaccccagatgaagagtctgtgatggtggaccctgagaaaaagtggttaacttcatgtggaaacatggcaatttcattctgacgatacattctgtggtggcgaagtttcgatacccactcatcaaagacttcttctgacttgacctataatatattcgattgaaaaaaggaaacaagagaatcattcactggaaggaacaattactcatcaaattgaggccactctcaaaatcctctttttcagttggcacgtaatttcaacagccaggcgcagtggctgatgcctgtaattccagcaatttggaaggccacggagggaggaccacttgagcccaggagttcgagaccaccctgggcaacctggtgaaaccctgtctctacaaaaaataccaaaaaaattagccagacatggtggcacacgcctgtgatctgagctactcgggaggctgaggtgggaggatcacttgggcctggaaggttgaggctgcagtgaaccgagattgagccactgcactccagcctgggtggcagagggagactgtctcaaaaaaaaatacataaataagaaagaaaagaaaaggaatggagaaatagcctctcattgactgtttacattgatgtggtctatgggaacaagtttgagaaagaaatgcagagtaaaaatgatctttataaagtatgtattttggctttctatgagtaagtccaactgttatttatttatttgagacggagtcttgccttgttgcccaggctgcagtgcaatggcccaaccttggctcactgcaacctccacctcccaggttcaagcgatctcttgcctcaacctcccgagtagctgggattacaggtgtgcgccatcatgcccagctaattttttgtatctttagtagaggcggggtttcaccatgttggccaggctggtctcgaactcctgacctggtgatctgcccgcctcggcctcccaaagtgctgggattacaggcgtgagccaccacacctggcctgttatgctatttttaagaaaacagaacagtgccaattatattaagcaacaaataaactgaaatttacatttatctgtctcttaaagcatttccaagttctctaattccagcttctctatccctactgaaaatattagcaccatttttctttttaaactcttttataattcagacttttcagattaatcttttctgaactggaatgaattagtaaattcttcctaaaatatttaaacttgttcatctctccaacaaagaatacattgctgaggagtatatgtggtatggtttggctgtgtcccatgtcccacccaaatctcatcctgaattcccacattttgtgggagggacctggtcagtgagaggtaactggatcatgggggcaagtcattcccatggtgttctcgtggtggtgcgtgggtctcgcaagatctggtggtattataaagtggtgtttccctgcacaaactctttctctttgcctgccaccatccacagatgatgtcacttgctcctatttgccttctgccatgactgtgagacctccccagccatgtggaactgtaagtctattaaacctctttcttttgtaaattgcccagtctcgggtatgtctttatcagcagtgtgaaaacgaactaatacaatatgttaatgaatgtgaaagttatttaaaaaaacatttctcccactctcagaaataaagcactatacagcaatagtattatttttctaacttttattactatcacactcacaaacctttagccatctctccataaatgaacaattatcgatttctaatttccatgaagaatactgtaactagtagtttttatttaaagatatttcaaatgtttataaaaatatgtgatatatataaaaagactataacaagcacctatataccatagatatttcttaaaagtcaattttggctgggcacagtggctcacgcctgtaaccccagcacttcgggaggctgaggagggtggatcatgaggtcaggagatcgagactgtcctggccaacatggtgaaaccctgtctctactaaaaatacaaaaattagctgggtgtggtggtgtgcgcctgtagtctcagctacttaggagtctgaggcaggagaatcgcttgaacctgggagggggaggttgcaataagccgagatcacaccactgcactccagcctgggtgatggagcaagactccgtctcaaaaaaaagaaaaaaaaaaaaagtgtgtgtgtgtgtgtgtgtgtgtgtgtgtgtctgtgtgtgatggtgtattgatattttcaaggtaaaaaaatgatagataaatgatagatacccacatattaggacaccgagatttatgaagctgtaatttaagataatccaaaaggatgcacagtaggttaacttccaagatgaaaagttcaggtcaatctgtgaaaatctttactaatgccagagatgagagctaggatatgcaaataaatgccagcaatatcactcactgaggaactgttaggttggctctggtgttgattattagaagtacctataagactggaagcacctgcaggggctttttaatgtgtcatttacaggaagaagcaatacaaacagactcacacctatttgtctcccctaaattgtgttcttgaaatgtatttcatttcccagatgtggttaagaggaattttacaggaatcttgtgttatcctttcctctgatctcttctcagaggccgttataagtcagtgcccaagcactcatctggactcacttttctatgagttaaacaaggtagaagaataagagcactttattaaataactgtccagggtcctgttccagtctctcaagcagttctagggccgtgggtgagcagcctcttaatctctctgctactcaggatcccttatctataaaataaatgggaccaaacagcccacaattaaaaactgcctgactgagtctaataactagaacgctcagataactacacttacctacactaagagtcataaccgatgttcaaaagaatgaacaagaaaccaaacagaacttaaagcaaatcacacagagaaatattaaactgcatttatcacaatattagcattcaatatattttcaggtattctaattctttaaaaattatgaattcataattacttttattttgttaaccagaatagtgggtaaataagaacctattaattcctgaccatgtcaaaatacagaactaagattcattggaagtacctgaagaaataacctaaactattctagtggagactgatcaatgaaacagaaaaaacgatagtattctttcttaaatttcttttttatcttaagatataggcttttccctcccatacttcacaccagtcatttgcagccaggggtgattttatcctctagggaacacctggcaatgtctggagacatttttgttgtcataactggagaaggatgccactggcatctagagagagggcagggggcagggacactgctcaatatcctgctgtacaaagtcggcctcccacaccaaaacatccagctcacaatgtcaatggtgcagaggctgagaaaccctgctttacacaattagctacacccagagatacagttaggctaggaaatagtgaagatttgactgtcttgcccattcaacaaaccacaggtatgtggcccacacggctcaatcaccacacacatgccatagagaggacagggacacattaagacaaggagctcatgatctcatgctttgattttcctaatcctcaggccccattcccaatatctcaagtaatttgcccaagtaagaaaacagtcttagtactttctcaattaatttctaacatttgggtaccatccaacaagcacatacaataactaaacttcctgagtttacactgggccaggcactataccaagttttctacatgcaacccgacaagataagtattacaataattttcattttgttataggtgaaaaaactgagactttcagagattaacttgccaaagttcaatggctagtgagtagccacatcaagatttgaaccagatctagatctcacgcttcatgctttgactatctctaccacctgtaggagagacagcacaagagggtaagcagctttgaagtactatttgggaacccacacttcaggggaaaaattcctgacatttttcactacaatatgagaattttagtgggattcctataaaattagccaaagtgataaaacagggctccatggcctaaatgttacatatatatttcaggaacacgttttaacctatggtaaatggttcttcactaaagatgttactgcctgggtggagatggtttggaaacaaaatttttcattgttgactgttgtcacagtcactgggggcaggttcgtatctaggggatgaggcgaccagcaggctaaaccctcaagcagtgttgacagtcctgcacaatgacgtcccattcaaataccaacactgtacatgagaaacactttggtaatgaaggtcttctacatgttggccgaatacccaaaaggcattaccaatagtataataactgatgatacttccccaacataagtgaactctgcacagtgggaagcagcctcaccttcagatggtagatgtgctcctcggtgtcaaggtctatgcattttgatgacttctttacagacatcactgagagcccgacatcaatgcagccatgcagcttctctctctctatctgcagaggcaccaagagggtcacttggggaccatggtgttagaagcagtagtcacatccctgacacacccttccacatcccctgatagtaaaatcacaaacactgcgactcatcaagcacttagcgtgagccagtgctgagttacgtgctggacatgcactgtcttcctgaatctccgaggtaggaagtactctccccattttacagatgaagaaactggagtacaaaggggttaagtaacaagcagtttacacagccaggatgtgaggaaacaaaagagtaagcaccgtgggttgactcccatggcagtgaattcacctgtcaactgtaccacctcccactgaatgagtttctggtgtctaaattcatttagaagtgatgtattaataaaagaagtgagagcagaaggctgagagaggacaggagaggaagaagggagaagagtaggactcctacaagggacaggacaaatggtcattcacacacagagccttcacacaccaactgcctgggattaatttgaaaaggaacttcttcacccaggggcttctccccggaatctctcggtcacagtgcaagagggagggatgccctatgttttgttcctgttatctagctgcaaggatgtattctcccaccccaggaactccttagcacaaccttaagaccagaacagacttttgcatgcccagagagtgttgcgggagcccctgcaccttgacctggtggaagaactgagcctgcctggaacccagagctcagacagaagtgtttcccctctatggtttccagttccgagaaaagctatcctcaactatacacactctcatctctgagctgatggttacccctttaggattcttcaataccacagtgggcccacaaaaagacttacatcggtttggctcttggcatatttcaagattcctttgtccagatagaagaatctctgtggggaagaaagtattattaattaaggcattcaatttaggtgcccttttcttggtctcaaattccaactagaaattaaatatgagtacctaagaaccaggtgctgagtggggcagtgtgagtgcaaataaaggggaggccaagaccaaccttaccttatgccagccttttaagggccacttcctctttttcagcaaaaatcctttctgaactggtggctcctgggtgtaattcatctcccccctcagtccttccaccacttcccagctgtcctgttccaacaaaagagttcatgttaaatgtctatctttttgaaaaataataatggtaaaaagcactgcatcctgtcagtaaatttattcaagatggggaggctggctgggtttgttggggagaagaaatccaaatttaatttccatacagtccctgggcttcacagatttaattctataatttagtggcatcaaattttggtttttttaaagctcttttttttttagaagggaatgtttctttcggtgtttgaaccttaataggcacagctaaatgtaaagattttcctgtaagttctatttttgttcagtttgacattaccatgcaattactgttcgttcagcactagacttcagtctgaattttaaccgaaagagagtgtgtgtgtgtgtgtgtgtgtgtgtgtgtgtgtgtgtggtgttgggggaaggaagttggtttaagaattggctgaacagtatgagacaatgcaaatcagtaaatatgacaacttgattgaaataattattttgttgaaaatcagcatccacaaattctaggtatttaaatgtactggaaatctggaagcatcaaaagtatatttttgcaacaagaattttcacttttttcccagaaatttgttttttccatctttgtttcaaaaacttttctttctttggccaattattacaaatagttgttacaactaatcttccactattggctatttaggttatttcaactaattgaaaaagaattttaaaagaaatagaagaacactaaaagttctgaaaatttacttttaaatacttaaaaataaatacatcattgctaatcaccccaagataaaccaaaagtagcaatacttcagtgactgggagaatttatttttattattatttttacatttttattggggtacaatatacatgaaatgcatgaatcttaagagtatgccttgataaaaatgataaatttttacatttatacatatactcagtaactgccagccaaacccgacagaaaacatttccaacacagagtaagttttgacaagcatgacacttcagccaagatttcacctggactaacttgctttgagtcaaatctccagcccacaggcaggtggtacaggcagaagccaagggcactgggagatggacagtgagtctgaaccagcaccagggagcaggaggcagttagattcaagtcctgggacacaagtggtctaacagggagggcacagaaaccacacagggtcctgagtggctctggctcagtttctgtgttgtcctcaagttcaatacgtgggacccacctggtaatgagaaccctttcctacgttagcaactgaattctttacataatgatcgtgatgggtctgccttctatctgatggcactttaccatgaatccaattaaaggtacattccagagttttaaaatatcacagtggtatcccaagatctggagttgtgaaaaagacttcttcaatggaaaaaagcaaagcttcgaaaaaagatccagcttttaaattagaggattttttttttaaggaaggtagcaatgttgaatgagatttcttcataacaaaattattaccaattattccaagtcacttaattacactcagacaataaatgcatactactaagtgatgggaagtcagatttcctattacttaaaaacaccaaaaaaaaaaacttacttgaatttattttagctcagaaagccattccacaaaatttaacacattttacccatctaaatgttaatgaacctttaaggttgtcaagttaaaaattccacctcaaatttcacctcctccagtggaaaataccatttcatccttagagactccataggtactccatcttacttttctggaggttcaccacttacttatgataacatgtacatgcggttttatcatccctgctggacagcaggctccttgagggtataaagggtccggagtatttctgatttccccacaatgcctaacctgctgtgctgtgaatagtatgcatctgattggcaaatgaataaacttagtcttggaataagtctgcaaacagatttatcttcttggaatgtcataaattagcgtgcatttgaaatgtgcccagtatctttgagccaaatgactatttacaaattagatacaatgcacccacaattgtgaaagaagagggtgtgggtatcgtcattgttaaataaaaatccaagacttaaaatcctctggaaagtactctaagtggatcaagcccttttgatttgtttgttttaagactcccaggcagaagcaacctgcagagcactaatactaaataatcatacacatctgctcaaaacattcgattgtgcacaatgcaaataccaagaggaatcagacgttattgcatcctttacaaaactgaagaaaaagtagataagatcatacctgtaagtttaaaggaaaacaagaattaaatctcagaactatttcaaaaattcctgttagaactggactgttcctcctcctgagacagagtgcattcctatcagtgacccaccaagaagggcagggaattaaagcacatctgttggcccttaacataaataaacaaaaaaaggagttgcatttttttttcctacaaaatattgtgttttcttcattttatcttccacctggggtcagaacttgaaactgttaccaggttggaaaagccaggtttgaaatatttaagaaagtgaagactctccttgactaaaaaagcagtgcaaccaactccttttctggactggacatccaaatctgccccctgcctcatcgccaacttccctgtcaccgtccatgagttgtgaggccaacatccagcctagtgtttctcagtgaggttgcaaatgctccctcggggacactgtggaatcctggagccacttttggttgtgacaatgatagggagatgcctctggcatggaatggctgggagccaggaatgttagatgtcccacaatgcctcggtcttgcacaatgaaaacgccgtcccacaccccaaagacttcccaaagtgccattagccatttctgtaagtgaaatgtgcttaaaatcacttgagcatggaaccaaactctgtttcacacatatatcaaagtattttcgcatggtttttatacactcttgggatgtaagtgcagagtaactgagggaagactgtattttgttctttttggaactttaccaagtgtctcctactattttagagaacgatattgctgaaggccatgctatttgagttattaatatagcacacctgtatcctctccatttgcagttgtcactttctatgtataggtatatctgatcacttcattatgtcttctggtgtagtcatgcctggacttttacatattgaaatatatgttttaacattaaccacattctttgaattttcctttatattacagtaaagcatgatgctgacattttcaaaattatgtattcaagtaggttacattaataatgaatatcatttggacatagtggctcatgcctataatcccaggattttgggaggctgaagcaggaggaacacttgagcccaggagtgtaaggctacagagtgctatgagcacaccactacactctccagcctgggtgaaagagtgagacccagtctcttaaaaaaattatatatgtaatttttaatatataatcatatacataatacatatttacatatataaattttatatatatacaaatttataggagagtaaattttggaggagagtaaagcaatcactaaaacactggtcataataagaggacattggttacgtggacgacagggtaagaaccactaatgaacttggtacaaattctgtgtgctgttgtaagaaagaatactagcccaggacacagtgtatgtgaaatcactttgaaaattgtaaaggctttaatattttcttgtaagtaagtcctgttggttccatcttcaaaatgtgtattttctacttcccttcctctttattgcccagccaccatcctaacctcggctctcatccattccattaattcctcacttgtgcttaagtcaacaaccatttatggggcctcattgtgtcctgtccttcatgcaatataaaaatgaggatgacaaaatggttgtctttatttccactttggcgatttacttatattttggcctcccagaatcttctcttgatcttttccaacgatgtgaactcttcaggattttagtttggtttctacctccttccatgaaatttctaaattatccaaaccacatcagtcacatattcctgtaaattacattattattactgtccattaccaaataatttagcaattaattaacttctaaggttttttttttttcttccctttcatttttatctccagtgctttggtctttttttcccaagctatcacagtgaccatcttttcaacttgcttagaatcctagtaaagtactaagtatatatttagtaggaactaagagatttctcctggtttattcattgttggggtctcaaaccaagaaaataagttctcaaaccaagtaaatggcactgagtagctggcctacaaagagatattaagctgtatccacaattctgtacagcatgccatttaaaacacaaaagaatagtgcctcaggaaatactatccagtggggtcggctgaaataatacataaacctaactatataagcaataataatataaaataattggagaacactttctagctctatgaaagcaggaaccttttctgtcttgttcactacttaaaatagtgcatagtagatattaataaatatgttgaaagaatagagcaactacaatagctaacacttaagcatcttctatatgtcagataatgtgctaaataccatacttacatgatcatgtttaattcctgcacaacctttgagattggatttattagtattctttatttttttgcatgtggaaactgaggaagagagaattagataacttccctgatgttacaaaaccaagtgacgaagccacctgactgcagaacttacatttttaatcattctgtcacatattatagcatactgcatttttactgtagtttaagtatgtaaattctgatgaagaaaaaggagtaaatcccattgggtagaggaatagtggtgggccaagaccttgagacaattggaaggagttaagaaacagtgcagtatggatggaggcaagtaaggtcttcaaccctgctcagagatagctactgttttccctatactgtaatcccaccaaacagggaagggaaattagcctgtgcattttaaggctgccaagtcttcgccattcattttttttcatatttggaaagcctgccccatctacctcttagccaggtaaattctcatttaggcccaaacctcctccctggatgacagtcaccttgcactgtcagcctccctagctagaacatgggttccgtgaggacagggactgtgtcttatttattacaatcctactacctgggaaataggggccgaaataaatgtttactgaatgagtctgcaaagcaaggggggtatcaaaagagtcccccagaaccttcgggacatgggactttaataatgtgtgctggattagagtgagttggcactcaggacagaaaacaagagggatgttggtttctcttggctaaaggaaccaggacttaggagtatctcctggtgaccccaagagtagggcaggcaccttgagctgcatatcctgagacacagtacagggtagacttgggcccttggggaaatcaaggccctgctgacttagcccaacacggctgcactgatgtctcatcctgtggggtgtcaagcttaaaggtcaccatgaataccaggtggagagagaaacatgggaggggttgggggatgtggcttcttaaggtttttgcatgagtttcactgaagacagtctggtgctgtcatctggcattaaatttagtctgttttactgaatgtctgaaaagtgccaaagatagaaagctgctttgtgattgcaaaggcagctaagcatttattcatgctcatgcgctggccaagttaatttccatattgctgagtgcacgaattgaaagcacttccctccagcacagctgtttccacaggcacctttcaaatgctgaatcctcagtcactacccttgcagtgatgtcagaaatagaaaacgattaaaacttttattcttcttgcagctcaagagtgttggggaagaaagttttgtggttgcctctatcaggcatggttggaaaacgggtgtcctgattactcacttaatccgtttatcagttttttaaaaatcacaaggcaatacccagccttaaatcatgtaatttaatgtgtctttaatgattttaaaggcattcaagatcttccacggcctattaagaaaggctaacgatcatcaatattaccttttatgattgttctatgaacactgacaatacttgtcaatagattttcaattaatagaatgacagctttaactgatgctagaccaaaactgtactcacatttcaatcactgagaactggagttgttgtttcttgttaaatgtttctcagctatggttttttgtttgtttgtttagcaccagcaggcctgatagcaatggcaatttttaagaaaagaaaaaattagttgggagaaaggtagtgtatgagctctcactcagtgcttctcaaactgtaatttgcatgtcaatcacttggagatcttgttaaaaatgcagatttaagttcagtaggtctgggggaggcctgagattctgcacctgcacagatgaggctatcactgctgctggaccataagcccaacttgagtagccacattccaggagaccaggctgtctcaaaaaattgggatttgacttgacagaatctgaaggcaaaaccaggactaacgggtgggaactacaaggccctggattccagctttgcctaaaggatgggttgtcttactatctaatgagtgctatgaaaaatggcaaaaacatggctgatctatgaaagtctctggagtgctccatcagaggctggtggtcacctggcagaggcaccacagagaagattccaagactggcagggagtttagaacaagtgagctatgagatcctttctaaatcttctatcataaactcatgtcatactaaacagcagcatttgcattagctctataacctcaagtacaatccctgactttgggatctaagtgagaagattaaagaaaacaggagactgagcaatgaagctcccacttgggttctgatgactaaatgggagtagcagtcatcacccgccaccgtcaccatcccttctttcccttcacacacagatgtagctctccaacctcaggccagagctagggaagtgaatatccagataattcaggccccagaatgtttcaagtcttactacttggttagccacagaccaaaaacactggtgccttcattacttagataatgggagaatattcatgctgtctttgtggtgaacccttgagaaagggaaggaaaatcagtccttgccagcagctgatactgacaacaaggagataaaatcctgtgggctgccagctctgtcagtggctccacctgaggtcattcccatcctgagtttccaaagagaaaaacgctttccaactgtattgaccacagacggatttataattaaaatagcattaataaaaacacttcaatgtacatatgactatttccacgctgttgatcactcactcagcatttatggctacaattactttggcatgtttttaggcccctcagatatattgggaagccattaatatttgttaaatattcccctaattgtatcaagccccttaaagctacaaacagcatcttctatgcatttttctctcctcctaatgctctgttcggtaagcagggtctcttagactattaaagatgaaaacatccagcccataaatgtcattcctctctggccatgcagcccactggggtggtgatggggtttttatagttgctattgtggtagtgattatagttataaaagtgacaactactatttttttaatatatgtaccttgtggtgattctataatgaaagcattattatcctcattttacagatgagaaaattgaagctccaaattagtttgtgcaagatcacaaactattaagaggcagaacccatttgcagactgcgtcttgagatcccacgcagaacctcgcagctgagtgtccactgtggataagatcacctagaagcaaactagcactcagctgagcccatccagggccacctactgaccctcccctaccagtcctgcctctcacccccctactctctcccccagcggaacaagtctgtcttttgttccaggggcatgtttctgccctccatacacttgtggcttagtcaataaagacaagatagctctgtccacccaagtgactcaagggtctcttctgagtttttctcttgccttcaaagtacaccataatgattggctttcctgtaccatcatggaatatttaagtctcagagtgtgacacagaatgaagaagtcatttacccagctctttcatttagagatgaggaatctatgctgagtgatttgtttggggctgcgaaaaatgagtgaggggcttttaaggaccaggacccaggtcttttgactccaactcatgagcacacaccttgtatgaaggggagaaaaactccaaaacaggctcctgtgtgaatgggactggggcctgaggtgagatatttttcctttttatatcacccaggactgttttaatattttacctttattatattttaatttaaaaaaaacctttcagtgacatgtcacagagccctgccctttggtgtctgagcacagaagagaatcacagactctgcactcagatataatactcttgtatgccaactacagggcattcatgactcttcaaggagacccactgctttgctggacagcaccagctgagaacagtgctctctcttacagagtgctcaaaactattttttcagagctaattgaaatttgcaatcaaagcagagatacattctgactaatcaacacatgcatgacttagaatcacaggagtaggtggcagaagtttagcacaataaactcttctttatcttgatccaaatcagaagtgaattattttcacagtgctacacaataactggttctcataatgagaacctagtgacaatgttaagatctcagagaactttacaaatcaaagaaggaatgactttagtgccaagtatgttatagtccagtttgtaacggagcttctttttaataggggggtccctgcttaaaggtccaaagctcattatcaggaactagagatacaaagatgtaaaatcaagtgctggatctcaaaaagctaacatacattacaaatgttaataaaagggataccacaaggttgaaaatttgtaaattgtcaaatgggagattcacacaaacctgctgcaggagttcagacaggcataatctccaaagcctagatccacatgagctgggactcccagaaaaaatgacacacagtaagcagcagggtgtcttagattcctgaggccaacttgatgagcagtcacaaactttggtggcttaaataaacagatatttattctctagccgttctggaggccagaggtccaaaatcaaagtgttggcaggtccacgctccctctggaggatctcagggggattcattccttgcttctccctctggtggctgccagcattccatggcatggcttggcttgtagctgcatcactccaatctctctctccaccatcacatcaccttttcctctatgtctgtcttctcccgaacgtgtttcttataaggacatttgtcagtgaatttagggcccacctggataatctgagctgccctactcatctcaaatccttaaattaattacatctgtaaaggtcctttttccaaatgtggtaacattcacagcttccagcattaggatgtggatacatctttttcttttaaaacagtgtatatatttatagggtacctgtgcaattttcttacatacacagtttgcatagtggtcaagtcagggctttcagggtatccatcaccacgtacattgtgtccattacctaatttctccccctcctccctcccccaccctcacctgctgagtctccattatctagatcattccactctctatgtccacctgaatacattttttagcactcacttatgagaacatgtgatatttgtctttctgtgcctggcttatttcacttaagataatgacctggtccagttccatccatgttgctgcaaaatacatgatttcactctttttgatggctcaacagtattccatgtgtgtatatattttcgtcatccatgcaatcattggtggaaacaggttaattttatatctctgatattgtaaatactgatgcaataaacatatgagtgcaggtaccttttagatatatttatttcttttcctttggcaagatacccagtagatcacatggtagttctttagttctttgggaaatctccagactgttttctgatgaggctgtactaatttacattcccattgacagtgtgaaagagttccctttcttctgcatcctcaccaacatgttgttgtctttgtattaatagtcatttgacttatataagatgatatctcattgtggttttgatttgcatttccctgatgattatgttgaacattttttcatatacttgttggccacttgtatgtcttcttttgaaaaatgtttattcatgtcctttgcttgttttttaatgagattatttgttttttgttgttgtggttgagctgtttgagttccttgtatattctggatattagttccctgttggaagcatagtttgcaaatattttctcccattttgcaggtagtctgttcactgttttccttttgctgtgcagaaactttttagtttaattaagtaggaagtgaacatgtctttttatgattcagctcactacacagggccccagggaccacggggccaagatgtgccaggaatgtgattcatctgaagtaggaacagagaggaggtgatttagggtgatgtgggcttgtgaacagatgcagtggaaaacacagctgaacttgacggtagggccagggtgtaggttttagagggatatcagatgacactagggaagtcttctgttgtgcctctgtcctacttcttgcactgtcacttctggacctttagtattttaatattatcaaattactgaagcagactttcccctccccaggaaagagctattgaatcggtcagctcagttcacatttgcatcaatagcttcttgagaacattccattaccttgtacagctgctatgctgtgctctcaaccagagcatctgggccagggttctgccttcctgtatcttaaatgtgcccactgccaaccatgaataaatatatttattttcttaaggcatcccatgcagttttcatcaaagtaatatttctaaatctcacccaaatatatttgctgtgattattattccaggattgcagaacaatacagacagttcagcaactttctggaagtgttttaagatttcagtttctcgtgatcttcagagtgtggaatgcagctgacagtctgtcatttgtggatgtggagaggaacaaagaagtcctgacaactcaaatatgtcatttgagctgatactttaacctcttctgatatcaaatgtttgtttgtgtcttataagacttactcagagtggaaatatattgagagctcagtcttatttcttcagccttcctgcctctgaggtatgttataaccataggggtggctaaaaggtcagcagtaaggaggagaagtaaaaggcccagaaaatgagaatctagaaaactataagaactatatagttaattatttttctcagtggggtccactagaaaacaaacaaacaaacaacaacagcaacaacaaaaaaaaacagctccaggcaaacagggatcctaaggctacttcaatcatccacgttcttcttggccctgcattcataaagatgtgagctgagggaggcttgtttaaataacaaccatttgtacataaggcatggaacttgaattaacttctgaagaagtcttctagcatctaaagaaacccagtgctctccaaacagttggttgccgggtcacctaccatttattagccatgggactccaaacaaatcagttaatatctttgggctgtatttcctttccacagtgggggaaacattacagaccccactgagttgtgctgagactccaaagggtagcatgaaaggatattatgagctgtgaagatgctatcggagagttttcacttcgagtgtcccatgctgagtcttcctgagagcagcctagacacaagccaagctgcctgcccctgcactgtgccacccacctcccagctgaaaagatgaagcagggaagcagctgtgacattgcttaagggctcccgggactcctctgctcacaaaaggcgaatgtttatttgtcaaacacttacatagcacttcctactacaggcgctcttcaaactaagcaacctacacctaataagaaaacaaggcagagagagggtattaactttgtccaagatcaaacaacttataaacagccggagattcaaacactggccatctggctccagagttcatgctcgctgcctctcctcttctatgatcatcatagaacagtgtgagacaaccacgatgtttccaaggtccctcctccttgactggactttcttgtggtgtttattcagcctatactgaatactgaaataaatttagagatgctaaatcttagtatctctaaagacattatgaaattgaaagaaataaatggggccaggtgtgatggctcacacttgtaatcccagcactttggtaggccgaagggggtggatcacctgagggcatggtggtactacaggtgcacacctgtagtcccagctactcaggaggctgaggcaggagaatcgcttgaacccaggaggcagaggttgcagtgagccaagattgcagcactgcacttcagcctgggcaacagagtgagactctgtctcaaaaacaaaaaaaaaaaaaaagaaagaaatgggactaaccattttcaatacccagacagctgaaatgataaacacctggacattattaaagtgttaattcacttttccctccttggcaaattcttccccattccactcacctgttttatgagttccggccctgagcccagccaggctgggctctctggagtgcggcataatctaataccctgcataaataagctctcatcaggtgaccctgggagagttcaagccactgtagttcagcccagaaacagcagggtgacaagagtgaattgcataattgtatggaaacttacctagcaatagatctctccatttcaaaacccctgcaatcatgagtgaagcacttgtcaattattttgacaggatttactctctattgctaacttctatgccaaatgctaacaatacactttaaaactgaatagaggctgtgctctctttaccactcatactctttccaatcagagttgatttcttatttatgatgaactgttcagctgtcctgtccttcatagcttcgtatatccctgctcagggccttttaataacaggctctcaatacatattggctgaagaaataaaactcaaggctataggactcttttgataaagacaaagcatacttggtcatctttatcaagctaatctggcctctggaatgtgttactttgaaaattctaggaaggaaatgtaagggggcagtgggaaaaagacaagaggaaattgcaattactcatattttacacattttaaaatagcaattctccctcccacttagatattccttaacccacttaatgtatctacaagactttgtgaatggtaatctttctactaagcaactgcatgtttattcattcattaatttaatctacacttactgaatgtttcccctatgctagtctagatgcttcttatttactgtttcatttagttctcaaaagtaagcaaaattatccaaatttcgcagctaaaaagcttagacccagaatgtgttaaaaaaaacatggcaaggttatccagcaggcaaaaagcaaaaccggtgagaacaagcatcagtttctagagctgcgtctttacttttgttccagacgttcaatagagtagttccttcacagaccacaggtatagaagaacatttatggatgccatcatttgccagaataaaatcaatggggaagcccttcttcattttattacagatcctcacaactgtcattggagtggaagagcttaagaatctgtgggctttttgctcccgcatgttctccatgtatacctggccatacattctcacctgccccaatagaaggatatttgtcgctggttttcaataaattcagtccgacgatttgtatcttctacatgcaaagccctgtcctaggtgctatgagaaataaaaggatgtataaacaggacccagtacttaaacaaccatatacttttttaaccaatgaagcaattgaaagaggaaagacgatggcagtgttaagcatggtattagccaagctcaaggttccaaaccagaacatttgtgaaggcttctctcaaatcctgtcgtggggcctggcagaactgggctgttccattcctctgttccttgtctctcatgaatcaactctaatcagcctttcatccccaggactgcaaggaaaccatttgacaatgacaccaatgacctgcacaaaccacggtcattttcaggcattttatttgacctatcagcagctatttaaacacaagttaattaaagaatagcaattcacatttactatgtaaatgatttacaatgagcaatcttgtttttataaaaatcactttaaatgcttaagcaataaataaaaattcttgctaaggaaatgacataattcaaaagggcagcagggtttcatagatcattctagctaaaggaatagtggagccaaaacctgggatgaggaagaacactgaagatccacttagaactctagaataatagggtatgattaagacagtcaggagggaccaacaacctatttttttcttataagcagggtccctttagttcctacaagaaaagtagattcctctatggtgaagacacgatatctgaaaagtgatctacttcaaaaagaaccaattctgtagagtgtcacggtttttgaaacaaggtcatgtgagttctgcttccagaactggccaaagtaaaagcagctcatccgtaattataccagtttcttaaatttacagaggacttttctccaaagactgtcaatgtcttttagccactgaaaacactcaattttctcttaccgcattccacaggaaaaagcaggagttgagttttcctccattttatgaatggagaactgagacaacctacacttgcctgaagttcatccaataacacaatataaagattgcaacagagagctcttgattttaactcttctctatcactaaggggtgacaaacacaatgtccatgctgtgctctccctgccttatgcccagaagtcacagctaaaaacacggcaatctttcccctgaatgcagactcagctgcaaagtccttcttaacacaatgctctgtgcagctactaccaagagatagatgctggcatagagggcgagaggggaaaatcatttaccacccaagcaagggcaaggcttagcaggatggggtaagaattcatcaacttttttcacttgttttaggtataggttatgcctaaagatgtcaaatgtagcccaattattaaacattctattgtattcgtcacaaaagcattttattaatgtgtagagtaaggcattttttattttaaaagtatatattcacatatacagtgtatattttagtgggcttttgtacaacactaaaaaggtatgagtggatacacgtatgatactgtaaaagttcctgggagaaaaaaagctagaactattcactatgggcattcaggactttcacaaataagacttgaaggtcaaattaatgttaattataatgataaaaacatacatttatatttactcagcacctatcctgagtctgaccctggaataagtgcttatttttcatccttaccacaatgctatgagaaaagaactattattattccaattttattgatgaaaaaactgaggtttggagagtttaaggtcacagaaccaattaatgggtggacccaagattggagagttaatgttctaatcactatgcatacctttctcctcaaattatcttgaagagattttattgacaggttgttttcatactggcaaagtgaggcttattgtttttaaaatctcaggagccccagtatttaagttaaaagatgatagaaccctcctcctagggttttcatggccctaagttgtacattttgtcttaggtcagatgtaaaaatgaaaacacctaggtctcaatcattttctccttcaaggaagcaagctcttttaacataggtatataggtaggacagtatctctacataaacacatagctccttgagattttatatgaataggtctgagataggaagaccaggttcaagtttaagttcagttcaagaaacaaggacaagagaaaattcagctccagaaagtgaaagaaaactagtgtggctgaagtacagatactctcaaggtcacctggcaatactggatgagaatttaagtaaaaatgactttaaaaaaccatgtcttccagctaagatggtgttttaagttcatgcatttaatgccccttccctattgccactctcactccaaatatggcaaaaatatacaaaatgccaccctcactccaaatatggcaaaaatatacaaagttataaacatgtagggctcctttgtgtctgtgtgataaagaaacaagattaaatatttccaaagaaaatgtggtgcatatacttatgcagtggactactattcagccttaaaaaagaaagacatcttgtcatttgcaatcacatggatgaactggaggacattatgttaagtgaaataaaccaagcacagaaagaaaaatgctgcatgatttcacttacatgtggaatctaaaaaagtcaaacttacagaaacagaggatggaatggtagttagcagggtctgataagttctggggatctaatgtaacaccatgctgactgtagttcataatactgcattattcacttgaaattggctataaaagtagatcttaaatgttcttaccacacacacacacacaaataactatggggggtgatgggtatattagcttgataatgggtaatcacttcctaaagtgtacatgtatcaacacatcacattatacaccataaatatatacaactttcatttgtcatttattagctcaacaaacctgaaaaaaaaagaataatgtggcaaaaaaaagattaagtatctccatggatcagaaccaaatagaaatgtgaagtatactgtagacaaaggtgtccattagcctgtttctgagggctaatgaggagaaaaatgtcatcaggaaaaggctgggacctgagccaggctcactactggaaatctgaaactgtggagggggaagcccccacaccacaatgaaagagagctttaaagatctgcttgcccagggagaggtgagaagggagacacagcctcacagccaggcgctgggctatgctgtctggggcctggtgctgggtccatcatcatcatggaacagaaggcccttgctgcaaatattagacttgactctgcactggggtcctgggaggtaggaagttggcaacagcaaatccctagatgggtcagggtgagcgcagagaaagaatacatggaaaacaatctctagatgaagctctaagctgcaattccaaagcacatgagaaaaactagcactaagaaaaatgaccaataaaatcaatatcagatgtatcccctccagatgaaagaaagaaagcaatttgaaaatgactttaaactggtgtttgaaatacaagttggtatttgtacagattatctttagttatattttcatattcctctaattaaatttcttactatgtaaatcttgaagttttaagtgtttaactggtactcttcagtgacgtgactggaaacacagtgtcatccttgtatttagcaaccgacagaccatcggaaatggctgtgccctaagtgaggaaagcttcaaaggttcctgcacctctgcagcacctttaaagactgaagcacaatcttgggccagtttgtgaaggcagattgggtatgggggccaaggtggaccccgtggatggaaacactaagcataccctgggacagaacacctttcttcgacagaaggatgagaaagcagacggaccaagaaaatgacctctggaaatcaaacatgggctttataactaacttcaggctgaagttaaaataaacttaataaattctccaccttctctgccacagaggaaatataagtgtctccatttataaagtcacagtgtatgcatattaaagcaggagaccctaaatataaaagatgaccatttgatgaatgagtgactgattgaccaagcattccaagtcagaaaaaagttgaggcatcaagcacattcctcttacccttcatgatgtaacttccaaaaaagctttgtgaaaaccaaatcaattccaaataacacactgaaaaaagtttctgtagtatttgatctgagaatttcattgtactgttccaattcctatggtgtaatcaccacctgctacttaaatgaatcatgttctccccctttatcaaagaaggacataacaacccctaggtgtaaggaagatggcgcaggtaggggatataccacatactgttttaatcccaaccagagttttggcttagggagaaaaatactcctgtggaaagctgacaaagaggacaagcacagtgaccctcatgaaaacagaactgcagggagccatgatgcattagccaatgactaattttagtcttttcttattttttttttttttaattccagaaggaaccgatgacagtgctgacaaaattctccttaacccctcaggggagatcctggagggcttcccaaatgtcaggtctgtggcaaaatctaatttcctggaatcacagattcatgggtggcaaagctccttatcccaggcaacgctcagttggacagacccctgatgatgtgtcataaacgtgtagacgtgactgaggtgggagttgcttaattgctgcttccaattctggaaccaaagactctgggtgatttctcaggccagcacttcccatgaggaaaaggaaatgccaacagaagcagcaggtgctgaaaaggctcagagaccactttggtcataaattcagctttctgacagctcattctctctccatctaactgctgggggaagaattataatgattaatgtgcatttactgccactgatctaaaaccagcaaattctgccaacaaagatttattagaaaggaaaccaagaaacaatatataattactcaacagttatttaggagttaattattcattcctttgtttcagttctttcttcctcctacttaatttctttggaccatttttctgtagattaggttacctcatccattatagatataaagcaggtgagtctcgaagctactaacagggcaatctgtggttacaagctgccataaaaggtttgatgaagggaagaaagttggggtggatattataattaccagaaaaatgattgattgtttttttgttttgcttagcaggatataaaggaaagtgtgggctctgaagccaaacagactgagctttgcttctttctttgctccttattagctgtgtgtccttgggcaagtaacctggtcagtctgagtcagcttcctcatggggaaaatgaagatgttaaaatctacattgggggacagttgcaagaattaaataaaattatacgaagaaccaaatgcagttcttcccacctggtaggcacacattattaaaattatacagaatttactctcctcatacagtcaagagataaccaaaagtaaatgctcttaaactgagaagtaggctttcccaagtaaatgtgtgcattttaaccagcaaacttgatggcttacatttgcatattaaaatttgcatgagttaaactttacctgtcgacttccttgcttggaagagcagctacttgtgctccttgaaggtgataccaatttttgggacacaccaaggttcttctcatcactcatcatggacagcaagtcacttggcctcgagacaatcaaaatgccatcagatgacaagggagccgagagtatggaagtccccagtggcaggtggtttagctcttatccaaagtatttaaaaaacattttgggtggcccaaaggaaaccctaaaacctaaaaaagagaaattagaaagaaggtcagaggcatcagatatcatctctaatttgccacaaattgtctgcaagtggcttaaacatactacagattacagactcacgatgtttagctatagcaggcgccgagaaggaaaagaagctttacaccattctcttacagggaattttgtataggtggtttttcatgtagctttgcaatatagcaggcttaagaacattaatacaaaaatttgagtccagacacatacaaaatcagtactataaaaaatcttaaaacacagtaagacactacttcacatccactgtgatagctataataatttttttaatgggaaataactagtgttggaaagagtatggagaaattggaaccctcagacattgctggtggaactgtaaaatggcatagccgtggtggaaaacagtttggtagctgttctatttctcaaaaatttaaacatagaattatcatatgatccagtaattccaatcctaggtatagatccaaaagaagtgaaaacaggtgctcaaacaaaaagttgcagaccaatgttcatagcaatgttattcacaatagtcaaaggtggaaagaacccaaatgtccatcaactgatgaatggatgaacaaaatctcatatatacattcaatggaatattattcagatattaaagggaatgaggtactgatacatgctataacatcaatgaaccttgacaacattaggctaagtcaaataacccagacacaaaaaaataaacattgtatgtttccatatgaaatatccagagttggcaaatccatagagacagaaggccaataattagtggttactgaggggagagtagagtgactgcttaatggctacagtttctttttggtgtgataagaatattctggaactaggctgggctcagtggctcatgcctgtaatcctaacgctttgggaggccgaagtgggaggattacctgaggtcaggatttcgaaaccagcctggccaacatggtgaaactctgtctctactaaaaatacaaaaattagccaggcacggtagtgggtgcctgtaatcccagctactcaagaggctgaggcaggagaatcgcttgaaaccgggcggcggggcgggggggacgggggggtggaggctgcagctctttgggagtcttgccctgatggaggggtttctagttttcaaagaggaaatgtgggcctagaatcactggcttctcccacagccctgggttaagagtaactaacatgtttggttttggcttcagaaaaccaggactttatttaacacactaagttcaagtaaattctacagctttcctaagcaggttaacaacatcaaaatatacatacatatatatatatatctccaacccattccattattaatgttcacatagtctaattataaaaagaagagtatcatatatttgtctaggaaccagctagttaactatgatatcaaacctggctaattatcatatactctttcctacaccttcattaacacttagttcttcaaaaataaaaaagagtacattaaagcaataagctagaatcaaaacaatgaaaagaaatacaaaatctcagaaaatgaaattaaggtgcccagagccatagagctcaattcccatgttactcttaggtaactccccaaatctctttattcatttagtattggatccaataataagtaagactaaaagcaaaccagcaccagcctcttcataaaattagccttactgatgggggcatgactaggtgtacctgaagttagaagcaaatgcaatctaaaaagtagcaagagagtactgtaaagatatattaatagtttgtggaaaagcagtgttggctgttgctgtttgagaaagaaaaaaaaaaaatcaaaaacctggtgggagccccaaatgatgaaatgtgtgtctgtgcttggggcggggagggggcatccactgctatggcaacagattccacagtggattaggaataccagcggagtgtttgtgtgtgtgtgtacaagctttgcttttgttttttctttaaggctgaggttctgttaaacgagagtctacaagagtctgggatgagaggggtgtgtgtgcaatgtaaagggagagaaacgtgggcaataaatgaaagttacaggaattctaaaaccaccaaaacagaaacaccacaaccctgtcctagaggcagctgatacagggtcatctttatctctttgtcctgcagaatttcagttgggaggcaacagccaggacttagtaggccaaatccaatagctatcaaagttggcacttagagccaagggctctgccagcatgaccccctggtgacccctacccctgtctcctttccccttctgggaaagaaagagaggggacccgcagcccctcccatgcccagccacaaggtggagttttgggattgttgcccggggaaatatatctatttcatcccctagaaccttcctgcctagcctcatcaggaatttggttaaagccaccaaaagcagcctaaaaagtaaaggaagtcaaatttcaagagaaggatatatagtcgcatgccacatcatggggtttcagtcagtgacagcccatgtatacgctggtggtcccataagactataattctgtattttcactgtactttctctgtgtttagttacacaagtccttacattgtgttactgctgcctgcagtattcaggacagtatcatgctgtacaggtttgtagcctgggagcagtaggctgtaccacatagaccgggtgtgtagcaggctctgctattcaggtttgctaagtatactctatgatgttcccacaacaacgatgaaattgcctgatgtcacatttctcacagtgcttcctatcttaagcgacgcatgactacttaaaacagggaagaataaagaaagaaggcagctgtagcccaagactaaggtatcccaggtgccaagatggtcacttggatggaggcaactactgtgtccactctaggggacaccacagggatgggctggggtcaccagagaggaggcctcggcaggatggtgcatatgaaagacccctgagtgctttcactccacccggagacccttccatggaaaacctctaattcaaagggtttatgggtttcaacaatatatgataatttccctgctcacagactgtgaataatttaagggcaaacatttatttccaccttattttgtactgagaaataacaggtatactaaagtgcacaaatcttaagtgcacatacagaatgttacacttgcaaatactcatataatcatcagctggatcaaaaaatagaacatttacggcctgccaaaaaggcttcttggtcccctggagctgatctttttgcagattgctgtccctgagtaaatctctcctgcaagtacttgtcaacatgccttaaggatggagagctaggacttgccccagcttacaggaacaggttttatggctactttggtgcattctgcctaatgtcagtgtttgatgtgtgacagaattcggtttgggatctgcttttgtttcaacaaaccacctggtggtgaggttgaggaggagagaacttatggccctttccttcctctaaatcacagaggccaccaaaaccaacacgtgtcaaacaccagatgcacttgtgtcagttcaaaaatgacgtttgtgcctctaagatgagcttcattgtctctcaccactgccacccacctttgagaagctgatgggtcaggactgtgtgaaacgctagtgttttggttaaaagtcaaatggacacatgacatgcaaacataagctgtcctggggcttccactaggaaaagagaaccctgatttctacccagaatggggaagaataaatgaccaacgcactgtcaagtattttggcaacaaaggctgattttaagactcatgttagtaggtttcacttagaaaagataacacaatttgggaaaagatgtaaaggtgacatcacatactatatatgtgtgctggaaggagtcagacctaggtttgaattggtgtttccttattacaaactctgtgcaccttgacaaatgtattaagctctctgatttatattttttcctgtataaaatggggaataataatagccaccccagaaaattagaaggatttggccaggtggagtggctcatgcctataatcccagcaatttaggaggtggacgcgactggattacttgaggtcaggagttcaagaccagcctggccaacatggtaaaaccccatctctactaaaaataccaaaattagccgagcatggtggtgcatgcctgtagtcccagctactcaggaggctgaggcaggagaactgcttgaacctgggaggcagaggttgcagtgaactgagattgcaccactgcactccagcatgagagggaaggagggagagagggagggagggaagagagggagggagggaggaaggaaggcaggcaggcaggcaggcaagaaggaaggaaggaaaattagaaggattaaataagaaaatgaggatacagtgtctggctttggaatagaatagacactccacagatgtaaaggctcatggcctcctctctcctggcttcctgaaagtggcaggtgcagcacaagataagaagctctacccctccttcaactacaaacaaataaagatggcagaatctttttttttttttttttttttttgagacggagtctcgctctgtcgcccaggctggagtgcagtggcgcgatctcggctcactgcaagctccgcctcccgggttcacgccattctcctgcctcagcctcccgagtagctgggactacaggcgcccgctaccacgcccggctaattttttgtatttttagtagagacggggtttcaccgtgttagccaggatggtctcgatctcctgacctcgtgatccgcccgcctcggcctcccaaagtgctgggattacaggcgtgagccaccgcgcccggccagatggcagaatcttaaaacatgtgtgtccttcaacatattaacatctcccaaaatccataatgcgagtgtgaacagactagtgttaaagcattaaagcagtgtgcttactttggaagaagacataaatgcagaaagataaaagccacagaattcatcaccactagctctccaaaaaagcaacattatctggtagattgcaaaaagtggcatataacacagctacttattaatccattaggcctgggggtctgcactcagacacttggccatgttttgcttgagaaacagattttgcttccatagttggaaacgactttcatgaaggccagatggcatataattccaaatagtttgcaatttcccagtaaaatatataaagaaattatgtcctgaattaacgttagaaattttttaagtgggatatctatttctggtctttaataaaataaaattattcaaatccaagttatgcatctttttacaaatggtaccctctgaaacaccctgatttcaaaaatgttacatggtcaaaagcagggctttggttatttggctttaagcaccacagaccagagattcagcatcagaagtttctggaagcaggttctaatcacaacttcagataccgatcggtgatcccggacctctgaagtgctgtccatgtgtccgaactatctgaactgctggtctgatccaaaggcacccatacctgactgtttctgggagaggagtactaagtttctgggagatgagtactaaggctcagtgtccacagaagtcccttctttaaagtctaacaattcctccacaaaccattttttttttaaatcttattctcacttttggcaagacaggagtcaagaggcctaaagactcaaatgcttactctggcacaatagagtatccatttctattccctgctccatccatggccttcacaatccacttcttcaggggacatcagattgctcagagcccaatccagcaacagaaatgcacctggtgcatatttgaagcgtgcggcttccatgagacaaaaagctggacaatggtatctggctgtcagtttaggctggaaccatttatttgtcatcactgagtaaacaaaacaacaagcgcaataacaccagtcattagaatcatggagcctaataacgaattctagcccaacctccggcttaaacaaagcaagaactccctctataacatggctagatcatcactgcttgaccacttcctgtgacagaaacaaggcacttcatttcacctttttaaaaatctattctagacagtttgtcatcatttagagctgaaataatgactcactataatttcatgcgctgctcctagatttgcccttggtaactacatagaacaagacagaacttttttttaaccataacctgcactgaaaccaccaccatccccacatcccacccagcaaatcttttcttctccagactaaacagccgcattgtcatcatcatccatttcttatgggacatggatcaagagcccttgtgatcccagatgttcaactttgatcacccttcaatttgtgcttctctaacagtgatgcccagatttaaagacaagctctaggtgtggtctggacagagcagaagagaaggcaatgacaatcttcctggcctcaaccacactgcaactgttaatactgctggatttgccttagctttgggggaacttgcatctctttccagttctcagtgttcttactgggactgtcaggtcatagggatttctgagaagttgggcttccttctttctgaagcggactcctttacttcctttaactaaaattcaggacttgactgttctattattattaccatcattataatcattattaaattatcacatgttaattttgacccatgtcaagatatttctggagaccaatggtcactggctgacttctttgttacggcatacatagattgcacaggcatatgaaatctatactcacccaagtaaattatacttggagatttagtaacgagaagagcaccaagggcatggaggtctctgcagcctgacattaatttgtctgttaattagcatttctgcatacaaatgcatacaacccactataaatgcccataactatacaatcacctacaatttctcaaagtgtccagatccaccttcttcaaagtcttccggattcttatttaagatgcagattttgctccactttagatgagttgaatcagaatttctatctagagacgggcctgataatctgcatgtttaacacatgccctgggtgatttttgcttaaagtttgagaacgtaactgacttagcctgtagctttcaacctttcttatttgactccaagccaatccttctatttgtgtatgtgtgacgtggcagagggtaggaagctaaaaccctcttttattatcgtagtcctgtggtttttaaagaggggccctaagacttgcagcatcattatcacctgggaccttgttaggaatgcaaaatctctgaccctaccacagaccaacaaaatcaggaactgagagggggaccctgggatctgtttttcacaagttctccaggtgacctgaatgcacaagtccaaaaccactgccacaggttaatattacaaccatggcatagaatctttcggcctttggtatacagcaggtcctcgagtaatgttgttttatttaactttgttatttagaagtttggtgatgtttttgtgaccagaaatatgccacaggaaacatgccattgtttttatcaattagcctacggtaaaattagcttcgtatatatcgtttcacttgaagtcacagtttccaagaacttatcaatgaagatacatgaggacttagtgtacatttgtcagggattagagtagaccctgagttcttttctgggaaagattttgtcccactgcttagctactccttaatcaaggtatggcaagtaccagacacatgtgcttccagtctccactcccaagctttgtcatcatggcaaaattcctcaatcagctctccagaaaactaaaagacagagttggctggccaggcgtggtggctcatgcctgtaatcccagcactttgggaggccaaggtaggtggatcgcttgagctcacgagttcaagaccagcctgggcaacaaggcgaaacccccatctttacaaaaaatattaggttggtgtgaaagtaagtgcggattttgccattggcacgaacctaatacaaaaattagctaggcgtgctagtgcacacctgtagtatcagctactggggaggctgaagtgggaggatgacttgagtctgggaggcggaggttgcagtgagctgaggttttgccactgcactccagcctgggctacagagccagaccttgtctcgaaaaaaaaaaaaaaagagagagagatggccaggtgtggtggctcacacttataatcccagcgctttgggaggctgaggcgggcggatcacgaggtcaagagttcgagacagcctggccaacatagagaaaccctgtctctactaaaaatacaaacattagccgggcacagtggcaggcgcctgtaatcccagctactcgggaggctgaggcaggagaattgcttgaacccaggaggtggagctgagatggcgccactgtactccagcctgcagtgagcccagatggcgccactgtactccagcctgggtgacagagcaagactccatctcagaaaaaaaaaaagagagagagagttggtaagacagatctaacctgctaagatgcattcccttatcctgattaagagccatgatttcataggacattagctgcaatctggtcataaaagtcaacacatatgtacctgtctttgatcctcaacacaaaacacccatgcaccaggctcttgccaaacattataactttgaactatgtactgtccagactttatcattcagtggctcacactctgagtgcatactgaaactacgtgacacactttcaaaaatgctgataaacagaccctatcctagatctattatgttgaaatctctggtggggccaggctttggtattcctaaacctccacaggtatttctggtgtaggaccagggttgacaaggtgcttctgggctgtgagccaccattaaatgatccaaaaagacaagacaatgtgtgcaccaagctcaagctatatcatctgataatggaactaccctattctgatcactaagaactgctttccctgcattgtcttctaggagtataaccatgacctacaatgagataattgctgccaataaataaataaccaacccactgtacgatactgggaaattttgtagagcagtaataataaagactaaaagctgtggactcaaactgcccgggttcaaggccagccttactaagttgctttaggcaagtttttagtctctctagatctcaatttttcatttgcaaaatgggaataattaaaggatctccctgaaaggggttgttgaggtgattagatgagctaatgcatataagaccatttagaaggcaatcacattgctataagttaggtagtgtaggatgtactggtcactatcctgcacaacatcacaataggtattttactcttttaatcagaaaaacacaaaggatatatacaaatacccatattactatcatccaaaattcacaggtctccacacatatatacccaccatttttctgggtttttttaaacttaacttctttctgcaactggcttattttcactgaaaattattgcacacacaaaaacacacattctgttccattcctgcaacatgactatgtcttgaacttcctcgttcagttgtttctgactctttcctactaaagatgctgatgcaatgaacaaacttgtatctgctccccatgaggctgtgatgataattttctaaagcaagtggaactgctgcatcttaaggtaggactagttttagttttactagatattccaaattgctattcaaaacggccacaccaacttacactgtacagaggcttcttttaaatgtctcttctatggtcatttacaagagaaaataaataataataataataataataataataataataaagaaaggactcttgaatgccacacctaaacgactggcttattcttagcttttagagactgtgaacagagcacctccctctttgtctgaggtactagcatggacagagggtcaaattgatggctcaccactgataatcttcagtagcaagagatgagtatttctctgtgcttggcttccctctattgtcactgtgctccaattctctcaactatggactttttccatgtgcagtatgtgtattattggaggccacttcaaaaactccgtggaataagacaatgtgtaaataaattactttttcttaagttagacagtaagacaaggtgctgctgggctgttggcaagatgttctggtactggtggttttctaactggcaaaaaccacaatgacttgtgtaccaacctaatacttggcttccaacactaggatgccttccatttcatcttctgggtgagccctgtggctcccagcctcaacttgacagttcctatggccacagacatccttagaacaagtgaaaaatgaggaaagcgtggactcacactcacaaataatagcctctagctcacagaatcagaaagccacatatcaaagatacttgccagtgaagaaaggaagagatcaagagacccaagtggccaatgttgcttactactagccttttgaagttcaccgatagacaattcaaagctgataggattcctgggagagcgcacttgcaggcagattgggagaagaagggaaagataatttccaaatgatttctatgcaaatgtaaccctatccttcaccagaagaaatgctattgactcagatcttggttttctaccttgttcacaagggtatcaccaaatagatatgttgatgaatacctcaagcggacttttcagaagtctgacatcttccttaaaaaaagagaaagttgtttgctacacatccacccctgtgtctgccaacactcaatacctgaatgccgagggctttgctccaatgctgagtccctcctcctggtcacatgggcctcactattggcacatgtcccctgacccctgaccacagacatcactcaggacagtgggttttgctgtagggttgacttcatcaggctgtgtcctccccactggctaccatgttctcaccaccaatttttttttttttttttgagacagactctcactctgtcacccaggctggagtgcagtggtgagatctcggctcactgcaacctctgcctcccaggttcaagcaattctcatgtctcagcctcccgagtagcggagattgcaggtatatgccaccacagctggctgatttttgtatttttagtagagatggggtttcaccatgttggccaggctggtctcaaactcctgacctcaagtgatccatccacctcagcctcccagagtgctgggattacaggtgtgagtcactgcacctggccactggatgttttcttaacagcatgacaaggaagacttactccctcttcctaacaaagacagtagttttggaggggagaagtgggacagaaaaagtacagttgaaatgttaaaatgtaactgtcaactctttcagtgaaaagaaaatgtggtatatacagtcagcccgcagtatctgcaggtttcacatccgtggatttagccaaccacagagcaaaagtattccagcaataacaatacaacaatgaaaatatacagattttaaaacaacacagtacagcaactatttacatagcatttacactgtgttaagtattgtaagtaatctagaaatagtttaaatatacaggaggatgtgcataggttacgtgcgaatactttgccattttatatcaggaacctgaacatccatgaaatttggtatttgtggcgatcaccgaaccagtaccccatacagctgtacatacaacagagtattattcagctgtaaaaaactaaagaaatcttacaatgggcaataacatggatgactctggaagacattacgctaggtgaaataagccagtcacagaaggacaaatacggcatgattccacttatatgagatatttaaaataatcaaattcatagaaacagaaagaagaatggtggctgtcaggggctggggggaggggagaataccagttattgtttaatggatacagagtttcagtgaagtgttctgatcataatatacaggtgtgtgtgtgtgtgtgtgtgtgtgtgtgtgtgtgtgtgtgtgaataaagttaagaggaactagaacagtgtactgccaggctcataatcaggagtgttgcacaaccatgctggaataatgcctggaggactggtatcaggagcaacccaaggcttgcaaacagcagtggtgaaaactaaagggctttgtggacacatagccagagccagatgcacaaatagaagataagcttctgggtgtggaaactcttcacaaagcatcgggggtcaagaggattgctccaatcccagttgttttccatcttttttcttcaaggagacgtactaacgggaaagaataaaataaccacagagaagacaaacttgaaacccacgacagagaagagataggaaatgtgcacccagctctgctaaatgggttctggataccaatttagcccaaacagatgaggggactgaatgacttcagtcttcatgggacctgacagtaagctatgccggatgagggagagtgagataggtatcagaaaatgaaaattgggtagattctgtgaagattattagaaacagacaggaaatttctgaaaagtctagatcaattattaccaaccctggctgcaaactagtgaagagcttttacaaaacactgctgcccaggccccagcccagagtccatgattgaagtggaataagctccgtaggacattctgacacgcgtccagggctaagagtcatgactccatactgatgagtgtgggctccaaaactattctctttgataggaagagggcgtaagtcttccttgccatgctgttaagaaaacatccagtggccaggcgtggtggctcaggcctgtaatctcagcacttcgggaggccgaggtgggtggatcacttgaggtcagcagttcaagaccagcctggccaacatggttgaaaccctgtctctactaaaaatacaaaagttagccaagtgtggtggcggggacctgtaatcccagctatttgggaggctgaggcaggagaattgcttgaatctgggaggcagatgttgctgtgagctgagattgtaccactgaactccagcttgggtcagactccatctcaaaaaaaaagaaaacacccagagtcacagcaccatgatctcctggtgaagcagaacaagtaataggaaactaatataaagaggcctccctcctgtcctcatctgcatagtgagtcattctgggctcagcaggcatcatcacggagcaggtaggaggttccatcactggaggcctaggcatcattggcatgtgacctcccatggcagcctcattccaggagcaggtcccactggcatcatcccaggaggaggagaacccatcactgacatcatgggatggccacttataggaggtgcaggcatcataccagggcaaagaggagccgggagacttgcgaggaggtgggatcattgcccctgctggggagaggcagagaatggagtaggaggaacctttccttgttgaagtgcagccattgtttcgtccatcaggctctgagctgctcttccaccccattctgacagcagtctttcatattctctttgtagatatcactgtagagtatcttttgcacagatgaagagtcatgagtgaggtatttattgcagtagtcacaatcacacatggacatgttgctctccaggccattggccactctgttcctaccacagtgtcttcacacattcatctgttgatggacatttaggttgtttccacatcttggctatcatcaacagtgcttctgtgaacacaggagtgctgatacctcttaactttaaagtgttgcttactgtctccttttctctcccagttccatgggcagtcaccaaagttttgtccctcatccacttctctctatgcacttcagctcttgatcatctttacaggccccttaccttagtaaagcctctacactgctccctacccccacactccagtccccagcctggtgttggcccctggattcatcactggaacagcaagcctatgctcattactccctcatgctgatattaatacctgccactggcttccctgactctgattaagatacccaccctctattaatccaaccaaactccctctcccagagcccccagtagtgtagattctctctctccctgacactgacctcatcaccccccaatgtgttttatattcttctattctcaaaacaacctatccattttagaccaccattaggccctgcaactgactccacattttctctcccagcacttcaatccttatatccattccctagttcaatttatcgccaggctctcccctgctccaaattcccaatgcctacaagcttaagtaaaatagcaaggcctggcaggcaaaaccctccactacatagttgcatttcactggttttggactctggatctacctctcactctgtggctaaatgtctgagttgcttcgtcatgtgaaagcaggcatgaataactgtactaacctcacagggttttgtgaagattgactaaaataatgcatgtaaaacactcagcatagtccttgccagacatcactcagttacactttggctgttatcactcaaacttcatctctaacaactcatatatacataccctgtattctgcactctccctttctcctagtgagtccttctttatggagcaccctcctaacccactttctctcttccgtctgtggcaaagtcctccatcttccgaagatcactttcagcattgccttttccatgaagccttttctcaacccctctcccaccccaaatgcgtttgtttcctcttggactctgctttccttttgcgctacctgaaagtattagtcacgtttcctgcactctgactcactcttcatatcctgactgctagatgttgggtctatatctcactcgggactgcattttattcacctctacattctgtggaaagtaatttacaaagactggtagcaatctttgttgagccaaggaaagagttctcagtgtgagcacatttatttattcccataggagacttctgtctttactgttcactggaatcatttgggattacttatgtatttcagaatatttcagctattccttccttgtgagatctccttgccattttaagtctttggccacaagagacatcatttctctcttttctctgacttgtttcaaatatttctagtaccatagagatgttatgcccaaagcatccttctttggggatttcatttcctggttcctgccactttctatcactagttaatgcttccttgttggctcagaaagaaacccagagctatcattctctgcattattttttcagtcttcttaaaaattaaatgatcggcaaaacaagtcaagagtttatcagaagttagccgaatgaaacatccagtgggtgattatctgattgaatctcctttttatcagcacatgtggtattcattctaaagtttcagtttctgagaagaaagcgccctccatagcctctatctggccatccataatactgatcctattacaatctttcttccctaccatgccctctttacccagggattcatcattaaggtctagatttccccaagactgcttctttacagtaaaacatccccttctaaaatcatattctagtcacgagaaccacgctaaccgtggtgagacagatccagtgatgctatctatatccaagttttaatgtttcaagtttattttgcttcattctcataagctgcacaatggcaaagagctgcaggtattttaccaaccagctgcccaggcttttttaaaaagaaattactgatgttctcctcctctgttattggtctttttatctttgctctgccggttgttctctagccaatcaagttttaacgttttttccttcccatcaaatttcagttcaactctcttaaacaagttagcaaatctcttgccaaacacacttgtcctcaaaagatggcaagagcctgctccacaaaccaaactcggcttatcaacactatctgtgctgtagttactttgcgtgtccttttcaagcacatggtctacctttccccaaaaagtagagacatcaaacatccccctcaagttctctacttttctaccatgacttcacagaactcatgatacatttgaggtttcttttgacatttagagtgtttttacccaaaccagtgaacggggtgataactgatagatctgatattttggtaagttagcatgcatgccttggcttgttatccagcaatatccactctccccttctttaataatagaactctcgagttttaatgtggttcatgggcatctaataagaggctttcacttctagcattctttgccgcttggtaggggcttgtgactaagggctgccaatgagatgtgagcagagttgtttgtcttccaggtcatggtcctaaaaagagatacacatgttccctgccctttccccattcctgagagctgggaggtggtgatagctggacccagaaatgaaagacacactggttgaagaccatagtgtcaccatgccagccaaggaataacaatatctgaacagttacatgagagagaaataaactttaatcgtgttaaagttacctaatttttgaatctctcagttacacaggtatagcacaaataacattggccctaagaagctggcatgccttcaaattaggaaccttaggtcacctctgtacgtcttaacagaaagctgccaatcacctctgtcctggccagcttcctgtgccagaaacaggaacctatggcagtaagaatccttttcattatttgacaaaataaggaaagctactgttttttttttctttctttttttttttttttttttttttttggagacagagtcttgcttttctcgcccaggctggagcgcagtggcgtgatctcagctcagatctcagctcactgcaacctctgcctcccaggttcaagcaattcttctgcctcagtctcatgagtagctgggattacaggcacacaccaccatgcccggctaatttttgtactttttagtagagatggggtttcgccatgttggtcaggctggtctcgaacttctgacctcaggtgatccacctgcctcggcctcccaaagtgctgagattacaggtgtgagccaccgtggctggccgaaagctactattttcaatttgaaggtgtgtattaccctggcctgaaataatcccaaatgctcaaaataggatagatggtagacatccaatcttcaaatcattttcaccttctccagcaagccagcccctttcatgttgcatttatcacccacgtggtcccaagagtcactacagatcaggatgaatcaatgttctgaatggagagagatgagtccataggtcctatgacaactcctccattcctgaatggagaaatcagaaatgggctgagttttcctcctccttctgcagcttagctactcttacttgtccttcaacaccttacaaggaagaaatacttatgaataaatgtgggctaataaaggaagctacagtggaaagacaggtggcaaaaagaagacaggcacactgatgaaaactcaattcagtatatatcctataaagtaactactatgtgtccactgctgtgctaacccttcagtgatggaaactaagtgacagaaacttaatccaaggaggaaaccactgtgatcaaggagataagatgtcacaaatgaaacaagccagaacacaccccagggtgggccatctggtaggtgctatgggcagtcacaagggaagagctcagtggggctggagttgtgagaaaaagcttaggaagaggtggcctgcagggagccgtgaagatgtggatagggcttgactaggtagagagaagcatggaggacaaagctgtgagctgggtcgggaggggcacctcctgcaacatttctcaaccccggctgcgtgacaggatcaccctgggaagcttctacaaaatcccaaagcctggtgccatttcatactaactggtccagacactggggatgaggccagggcaagggcatcctgagacactcccaggtgatttggatacacagcaagggttgagccactgctctaacataatcttgcatccagaaatgacagatttactccacagaactgccttctttaattttggtatttaattttgtttgagcatcttatgccagacctatgtctgctgcatccaatttataccaaattgaaatgcaaagcaggatgtgacttagcagtttaaagggtaagaaaagatagcaccacccaagaacttaaaataacatctggtggtttgaattttatcagtgggtgttattacgctcccttaaccgacaactgcttgcggaagcttggtagagttttaacaattggcaaccacaggcagcatttcattacttatctaaaaagactatcaattgagttactatgaaatgtgagcatgaagttttaaaacttccctatttcctacaaaaatcaacttatcatcttttcagaaatgtaaacagccagctaacaatgggtaatgctctataagtgctaactgaacactctcaaataacaagaaacaaaataccctagtgggtcatgtatcagatgtacacacttcaagtttgtttgtccacttaactaaaaataaccctgggactcagaatctaagcttaaaccaaattctataaatcgaagtccccaagatatattttggaggtatccttccaaaactgcaggggcgataataattccttgtaagagaatcactaatttagggaacataggtggggagaaaaagggatacaggaagttttactcacttctaggggaaagaaagattactgcaaaaaacttaacctgagacacttttaaactagtgcaaactggaaaaaagagagacataaaaggaaaaggcagagtaaacaggttttaaaaaggtggggtggttactggtagactagagctaaaaggcaagaaaaacctaaaagcacctctgttcccaatgctaacaatgacatggttattttattctctccagtagagtgtatagatcaaaagcaatttgaagactgtctcatccttgtttttgttttttcttaattgacacggtaggtagtaggttatttgtttatcaaattgataacctgtgttccctccccttcacactagctactagaaggtttttactaaattttatctccgaagtaagaaaatattctcaagtatccatttatcaaactttaaaaatttgtggaaagatagatcctaattctttaggagtttacatctagtaagaatgttaccaaaaaataatagttcataggaattacaaatcagaaaatgtaagtcaaaatgtgggatgtaagtaatgtgttaaaactctaagctggattccatcaaattaattttaaaaatcaaattcagcaaccagggccttgatcttccttgcatattcccctatgttgcagattcactgcagacatccattgatttagggagtttagcacattaagggcattctaataaaccattctgtgcttaccgtttttcatcaaagaactctgagtactatgcaaaaggcaactctcccatcctcacacccaaagacagaacagccccagcacagaacaatgacaatcatagctcctgaaaatgagaagcacccagtctccagacccaaggcagacgtcaaggcttatttatggcttagagcaagctgatgccagttctgattcatcattactgggtgtggaagatgtatttttcaaagacgaccataccaatgtacatcccatcccacatgctcctctaacaaagtgaccgtgacacttcttcatcaatagatggcttctatattcccatccttcaaatttgagtggcttctaattatggcagaaatgatgcttcgtgacttctgaggctgcattagaaatggcaatgtaacttccacttgtcctgttgtctcagggtgcttgcccttcaactcagccaccacgatgtgagtaagctcaagctagccaacatggaaagaacacatggagagatccattcggaaaagaatggcgaccgcctcacctcagccgataaccagcatcaacccgcagacatgtgactgagcaaggattcaaatgtcccagcctccagccttcctgctgtcccagttgccagtgagtagagcagaaactatgtcttttcatcaagtcccacccaaattaaagatgtcagggatacataaatattgtcattaacctaccagttcatcgtcattgtctcaatttaccaagttttggggttgtttgtgacactgcattagatcgctgaaaccccaggcaggaagccctggcagacctccagactcagcaggtgggaagcatgagaacatggggtgaaaaagtctcctaggtaagtcagcagcaacactctcttctcctgtccctcaggctagcaggctcctgctaccagagcatcccactcctgctgggtaggtcagactcagaagggggctccttgaccaacaaaccctgactcccttataaagtcacttacaagaagcagacacggtctagtgtgggggccaatcagctgacaaaggccggtatgtgtctgatagtgacagacacatcacaaagtgacactgggaatctaggactgggcacaaagatgaaaagacacatgaaccccttaaaaaccctggaaacattcctttcagcccagacctcaaaatttctcccttatcatttggcatttatcttcataatagttgaagctgtgattgggagtgcattgtcatgtggtaactgagccacagagaaattaaatatcttactaaggtaacagggtcagtcagtggggatacaactaggacgaggacaaggaccaaggaccgtatcccatcaaaaacatacacccagaaatggaaaacagagctaaagtaaagtaaaagttctacatatatgcattgaaactttcctaaggagcagattcattacgaaagagtcaaaatcgcaagcaccattcaatcctttggtaagaacatgcagactcttgggtgttggccagagggttgttcttttaatattgcagtgcaaagatctagttcccaccacaaatgggcttccctgagggttatcaacaggataccaacaaggcaatatggaaagcagcttgtcatctgaataggaacagaagaatgattgaaagtagaggtaacaagggagaagagacaagagcccaactcttaaggctggaatgaaccccacaggatcatggaaaagaaaagatcagcacccagaccagagccagccattggacagcagagccagtattggacagcaacaagttctaccagccagtagcatctactagccagtagaacttgatgctgtccaatactgtagcttccagccacttgccccagtgagcacatgaaatgtggccagtgcaactaagaaactaaattttaaattttatttcattttaaattattgaaatttacatagccacagatgactggcatctgctatactggagagcccagttttagaccataccattctaaaccacttattttctcccttttttttgtagcacaaaatgggcaaacctagacacatttctgcctcctgaaatcttccaggtgtgtcctgctccacctcctctgaaaaagtcgatggctggtgtatatctgagtcaccacaaagtaagatggccaaaacttaagtgtgtgaagtcacatctgggcaattttctttcccatttcctctattgtctggataaaatgaaacaaaagatgaaacaggctattggttttctacatgagatcagcagggttttttagtaaaaagcccaatgtaaacttacaggtactacaaactgtgtcaccacaagagatgagctgccctacaaggaccagaccctccagctcatacaacttcaactggaaatcgtttaggaatggtttataaggactgctcagtatcaagacaacaggctgtcaggcaaggcaaaagatcatacttcgtaaccaaaaaagttatcagttaaaaaaaatcagatgccaattttttggtagatgaaagtatttgccactttctactatcttcagatggcaaccaaaacctaccatcagtcagccaagtgccttttcacagtgggcagggagagagaatgagaaatcttttaagagggttcccacacagctccacaaagctacccaataattctcatttggcctgctggaaagttgttaatctgtcaaagaaagaagaaactcaccaagaaaatagctgattctccaacatgtaagtttttccataatctgacccctgatttaccaactcaaacttacttcagccactacccaatagagttctatcatttcaggcaaagtctttaaaattcccccatggaaggtgggcattttcataaattgctagtagactagaaatgtgaacaacctctttagaagacagtttggcaacagaaaagttgtctttcaaaaataataatcttccaaacataataatcctcaaacatgaaatgtttccaaattcaaggaatatggcacccaaaacccctttctttaaaaaaaaaaaattcaccatgttgcccaccaaacattaatttttttttttttttgagacagtctcactctgtcacccaggctggagtgcagtggtacaatcttggctcactgcagcctctgcctcctgggttcaagctattctcctgcttcagcctcccaagtagctgaaattacaggcagctgccatcatgcccagctgatttttgtatttttagtagagatggggtttcaccatgatgttggccagactggtctcgaacttctgacctagtggtccacccacctcggcatcccaaagtgctaggattacaggcgtgagccaccatgcccagcccattaaatttttaagaatgaaaagccatagtaaaaagaccaatggttaacagtacattgattaggaataaataggtggagggatacccaggggaaattagagctacagagtgttaaaagtataaagcctaacaaaacaaaaataaaacaagcagcatacatcagaaagccaggcagggacaaagggagaaggcactcgatgtttatcatgttgtcctgttattctcaatccatcctgactcccaaccttgtgatggttttcacctctcttctgaacctaagagaacaaatactcttatgctacagaattacttttcagaagatggacaatttctttcccttttgttaaattcaagatcaaattgaatgttttacttttaaagccatgttttgtttgaactcagtcttacacaattatttctgcccatcatttatctacccatccttctgttcctctctcacagtatgtacagaggcatggctgaaataaatgttaacatttgttatcttccgcttgagcttttttgggtaatattttactttctcctttgaacttttttttcttttgcctaattttttttaattaagaaaacatcagtgaagtaaaaataaaacagcaattacctttctggcttgcatggttctttttccatttgttcacctgatctgtgtttctcttatttcccccaacactccccaacctcagattctgactcatatacctccatcagtcttcttcattccctgaccctcttctctggctgtgtctcaactgttggagaaacattatgtgccatgctctaaggtgaaagaatctgcctaatatcattcctcccgacaccatcatctagtagggaagtgtagaaacctcccgataatgtagataagaaaaaaacgtggtgcttgggtattttcactagagatgtaaatggaaacttcccatgctgggattcccagctgtgctgctgttacaccacaatggtgacatataccaacacacacaaaccaggtttactggcagccactaagacgtcttccatttccaccccccccaacctttttagaaaattaaataaataactcctatttgatgacttagaagaaggaaggaaggatgggtatatgggtagagagagggaaggaaaaagaattcccaggagtagagggggctgcacccatatttgtaactatatacaatttgctctaccacagaactccaagaatgcattccagtgacaacaagcttatctactaccccagcaccattatagtggtccatattttgtttattctatagcagaagtcagtggtcatgttttccataggtcatcctcctgcctcttccttgttctccatcttaaggggtgtgcatcagagcaaaatctgcagaaattgaattttcaagttcactatatcaaggattatcaggcaccatacagactgcgcaatacaagtaacagattttaaaaacccaaatattgatatcctggagcataggatatttgtaacatatatatatatttgtaacatatatatatatatatatatatatatttgtaacatatatatatatacacacacatatatatatatatacacacacacacacacacacttaaacagggagtttcatcaatttttttgtaactcctaatttaagctctcacttttgtggcagttcttagagaacagacacagtcagcttctatgttatgtatcagcagacatgacctttcttagaaacagcaactcaaaaagactaaagaataagacttcatgtctgagaaataaaggcattaccctgaaccataactatgcaaaatatgccctggcaagtactagtcccagaaggctctctgtgggctagggggagactccagagactagtcatctttgggaagtcctgctcttaaacattcactcttaaagacaccatgtaacatatgttggcacattaaaggctctgagaaaccctgaagttaaacaacaaaagcagcaacaacaaaacctgaacctgttaacttggttgaactcattccaaatctatttgataatggaatccattctctgaggcaacacttacccatttaccaagattccttcagcctgacgatcctgtctagctttcaaattcagtgatcctatgagtccataaaatgactagcactcttacctataaaggttggcttatcctcgacgcacataatgacaagcacaggtgctgtttctcagtgtgtatcaggctcacagcagccagtaatgacacctggatactctttgtttacagtttcatgtacagacctgagaggtcaagagagtcatgagaaactgaccatcacataaacaccatagcaatgttcagaagctggcagtgtgctttcctacttgaccctatcctccctaagtttccctccttggttctcatgaccacataactgtgccatccccaacatcccactctcctctccacttgctgtttaaactttactactcacactcaatccttcctatttcagtctggaattaccccagagagaaaacatctagatagaagtatgtatttggaagaaagaagtgccactcgagagagttaaaacactaagtcagctggataaactactcatgaaaatcttgtggaaaatacctcataattaaatattcacacaactgttatgtgggcttacttagaaacatatgtacaagcaattaactttatatttacccaagcaaataagaaaatgggatcaacatttagtactcacttaacaaatgttcactaatcacttaccattggtcaggcacagttttagacactggagataaggcagtgaacttagtctgaaacattatacaaatatcacagcatagactagaaaattcagtaattccaattcctatgatgaccctggagaaaatactttctaaatggaagaagaatgattttaaggaagaatttagaatcgtattacaaggtaccaagaaagcttctgcatccatgagaaggggatagaaaaggcaacagacataaattttgtaactaacatttcccaggtacaatgctagatgctcttacatacgtcacattatttaattccccgaattaccctttgatttggtagagtttcattttatagttaagaaacagagccagtggccaaatttttggaatatgtctgattccatccaaatccacaccttttatataaataccgagcttagatctgaaaatgaattcatggccacttcaaatagcatttccaatatgacttcataatgacaaagaaaagatatctcaaaatatgtgtgggagaaggacagacatcagcatcacatcaaaaaataatcttttcgaagttggaggagtcacactttgtgatttcaagttactacaaagctacaggcaccaagacaacgtgtcctagcataaagacagacatacagatcagtggaataagattgagaatgtagacattaagccctcacacttatggtcacttcatttttggaaaaacggcctagataatccaaaggggaaataaaggtctttaaaacaaatggtgctggtgctggaacttgatatctacatgcaaaataataaagttgggccccctacctcacactatatacaaaaattaactcaaaatggaccaaaggcataaatgtaagagctaaatctataaaactcttagaagaaaacataggggtaactcttcctgaccttggattaggtggtttctgatatacggcacttaaaaacacaagcaactaagggggaaaaaagtgataaattggacttcatcaaaattaaaacattttgcacttcaaagggcaatatcaagaaaataaaaaggcaatccacagaacgagagataatatttgccaatcatctgatatgggtctagtatgcagaataaagaactcttacaactcaataataaaaaaacaaataatccaatattttaaacaggcatataactacaatagacatttctcctccaaagaagccacaaaaaatggccaataagcacatgaaaagatgctcaatgtcattaaccataaggaaatgcaaatcaaaaccacaatgatgtaccactaaaatgtttatataaaattatttacttaacagacaataacaagtgttatcaaggatgtggagaaactgggaccttacacagtttgatgggaatgcaaactttggaaaaccttctagcagttcctgaaaatgttaaacatggagttaccatgtgacccagcaattccactcccaggtataaacccagacatatgaaaatgtatgtctacatgaaatcttattcaggaacgttcatagtagcattatttataatagtcaaaaagtagaaaaagctaaatatctactaactgaatacataaataaaaagtagaatatccacacaatattatttcagccataaaaaggaattaaatagtgagtcatgctacaacatgtatgaacatgtaaaacattacactaagtgaaggaggacagattttttaaaggccatatattgtatgattccatttatataaaatgtccagaataagcaaatctatagagacagaaaatagaaaaatgtttgccaggggctggctagaggcagaaggaaacaaagtaatatggagtttctttttgagtgatagaaattcattagatagtggtgatggtaacatgactctgaatatactaaaaaatattactgacatacattctagaagagtaaattctgtagtatgtgaattatatctaaatgtaaaaatcccttgaaaactccaacaaggaagttatgaaaaccccaccaagactgctttaaaatagcaagctcagttgaaaacaaatgaccaaataaaatcaacatgggaccctgtgatttcggatcagcctatataaagcctattgaatctataccatctagtgaactcatggaaatgaaagaattaaacagcaaaagtcagaggtcaaattcaacttctacacatggaaacacctgtacaaattatgataagacttgtcaatcctgctgccacattagtcatcctagaactcacttgagaggttgttgacaattatatccagtaatgaacctggggtcttctaagatcccaaaggctttcttctatcccaagaggcagcaccagcttagatctctgagcatttatttatgtgtaatccaaggtctaatgaaaatctttacagaatgactaaaagcctaatctggatgtgacatgaaaatgactttcaaactctgaaacaattggttgatctttgctctatatgcttgctttacatttagcagtgactcaagcccacattaaaaaaaaagttacaacaactctaattctcagaaataccacgatgtaggctaaaatagatacacatatgtacacccatattcacacaaaccaacccatcacgaatccaaagaatgacataggctaatgaaaagcctgaactgcattgtctgcagacaaaagaacaacatgaatagggcaagcacagataatcccaacttttgaggctgagttccaaaaggtaattgtaaatcacctctttgacactactcaaaacacattttttcatagacgtttggtcatgtgcccaggccagcccagagaggcctatgcaatgcacttaaagctaaacacgccttccaaggtcaactccagaatgtagctcagaagtggcagcatcctggctgcagcagcaggaagtagaaacagtgtaccctctagggtacctctcagttaccctaaactgaggagcaaatacagggcgtggtccacattgggaatcccatcctactcccactgagacatataaatccttaacaagggatctctaaaggctgagagaaggacctggcttcctagtactatcccagagttctaacctcagtacaattctgctaatttggaaatgaaaacaaacaagagttcacattatgggattttaaagaaccttccattcttacagagagccaaattgctggatttttcaaaaatgtattttgtaaggaagatacatgaaaagtagattaggaaaagtagattcgtgacttttggcagcttctcaacatctatgatcaatacagattcaatttttcaccacctttatgtctcacgtccagccaagaggctggtacacagcagccacctcaaaaacgcttgtggaatctctatacttctaacattgttagtattgtgaatgcaatttactttttaaatactgtaaagtaacttacatacagtgtgacggggattaacaggattggcctggcctcagaaaagacattatttaggtgagaaacagaaaatagaaggttaacaaatacaaactacaagcactgtactatctggactgtgttacaaaaagtcctagaagggcacagtgagggggactggggagagcacaaactttcgtgttagaaaggtggcttgtccttaccagcaatgtgaccttgagcaaatctgcttccttgtgccttgatattctcaaccagggaacaattccctctcaggggaattgtatggctgagtgaccagcgtgggagggaaattaagttttcggtggatactgtggtgcttttagagtttgattctagaaacatgactttctcattaaacaattaaatacataaaatgcactatgtgattcatcattacagtaaaccccaagggaagtgtgtaaaatgccaggctgctctccctaacctttcctccatttccttatgccctcttcttgttctcctgtgacttccacagacctgccagctctgccctggtcctcagtctgacctcattctagcctgaccacctgcttcacagccttgctatgaactctgttctttgcacgtaatcccctagtcctgcttcaggcttcaggtcaaggatctctgtccaaccctgtccctgctgccctcaccctcttggtgaaagtgacagaccaccctctcagggagaaccacagggctaattctgattccaaagcaagcttattactttagggtcgatgcagcaaacaaacaaaaaagcaagtttgcttacagttttggcagtcgaagaaaaaaaggaaaagaataagaaaaagaaaaaaacatataaacatgaccatcagagatactctacactataaccactacatacttccccgccccaacacacacacagaatcagaggtggaaccaattaagcgaatcttcctcagttcagaacagcaaatctaatcctagaagatagtttccatcaatcacaataggttatctatctagaaagggccatcactaggcccacagaggagcccaagcatgcctgttgacctctctctacagagtggagctcctcaggactggggagtcagagctagaagagcgtctctgctcctcagcaacctgctcctagaaccagcctcttccactctcagggtgaatcagcatccaggtctgtgcctcatgtctccctgtccactggagtaaccccaacaaagggtagccactgtgctgacctagctgagccaaccagattcccttcctcagaacgtggaagtatttcgaagttagacacacagggacctaggcagactctgaagaccactgaactcagtagatgggtaggactgccagggcagctatttttaaccatgagctgggcaagcagggatgagtatgggacggcagggcagagagagggagggagagactaaaagataagagagattgacagacaggagtcccagagaaatacagagtgtgaggcacagagacaggcagacagacagcacgcacatgcaatgagacaggggcaggcaaatagaaacccaaaggagaccaggaagatgcggagctgcagtggggcaggcgggcggccgggtggggagaagagagatcttcatggggctctgtctgctgagtgggaggccctcctgtgtcacagcagtgcttcctgctgcctgccaggggctctgagagctgcccccttgcatcactccaatcaaccctctcttacctgatccagtctatttctcacttatgaaatctagaaaaacaatttcaaatatcaacacctaatgagaagcagcactggcaattttgacacatattgtggataaataagttaaaatatctgggaaacctacttggctatcactaacaaaattctataaaatattgatacctttggactcaatgtttataataggaaaaagtgtatacaacctcaatgcccaacagtagaagaaaagttaagcaaattaagaccaaaatacgtttacttcatgtggtgaataatatcacctctaaaaagatttatggttaagagaaaaatgctgaatataaaagtacatagaactatgtaaaaatgtacactgaaaataaagaccacaagaaaataccgagggagataataggaggccacatttgggtggcaacgctaagagattttttcttcctctatacgttctctgtattttcaacatttttataatgagaatatattcaagatgatatattacgtaaaaaacaaatagaataaagagcgaaaaagtagtaagagtctaactccgatacacttttgtacttgtgactttcctattgctatgatacccagtacggattcctacacagaactggttctaagaattgccgtcatctggctaagcttcttcccggtattgctatggtgacatttacttagtaaacatttcctcaatgcctgcccactttgtacaaggttgagtttaatggctgctgatactctgatgggctactcgctacccatactttctgagacagccaattccatttttaagtgtttgggtgacactgattatctccaacttaatcagctgtcctgaggcctgtatgagcagctcactgatctgacagtaatcagaaggctgttagatgcccaacaagtttcccttattcttgagatacttagacctatagctgctcacggttctgcctagcagtcacatttgtcccggctcaggtggtctgcttgtcttcccttctttagatagaataagagtcaactatatatagctgttaccctttttcatttcttttttgtgtgtttatacactaagaagacaagggagaaggcatagcaattcatcatttttatatgtcgttctgctctttgtaagagccagtggaactatacatacaattaacattcaaaaaacgttactaaagatttctaaatgacatgaccacagaattaggtgttttaaacaccatgtatgttagcacagagttggatttaaaaagccagcagctgaaacagaaattatcctggtagactgtttacaggcctaccgctgtgataacaaacctccctcagccccttcaacatcaaccccagaagcacatgtagagggtgggtggttagccttctgggctgacacgggcatgcacatctgactttgttattgttgtctgagtttttggaacactggggggtgatgtctgcctataatacatgtggccagatgtcttttcaagaaaagaagaaatatcccaattccagccggaatactcaaagacccaatacagtttccccatctttccttgctggttcttatttaataataaaatctgtcttccttttaagcagccagtggacaggcctgtttgaggcaagacgcactaaaatgtctcaaaggaattctacaaagatggctttcctttcaagtttaactcctgaggaataaatccttctctgcaagagcattctctagtttctcagggctaaacatgcattcagcagttcctattttgattggaacgtttcatcgcttttctctatcactgtagcagacagaatcactgaattgtatacaagagaaaaccaggaataaagagataggtcctactgatggtgtattcaaagcaagctttctcctttaaacctcaatgttgctagagtgaagaaagtcggctggctagctttatttatttcacccagatttgtgatgtggaaaaggttgaacagaatagcagttttagtttccacggatcactataagacaagatgatataactggaattagaaatataaagtttatcttgtttcattaaaaggatccttaaatagctagagattgaaatcttatcagccttcagttttgcaatggtgtgatgaagaggcagacgctactatcaggcagttcccataacagggctaggtatgccgtggtcattggatcctactatttctttgtgtctagaacaattacccctcaggtgtactgaattggggatgatagtgacctactggcacctatagaagtagtgtttataagatggactccatttcatacaaagctttccagttttcagtttgaacgtgtagggttatgccatgcccctgatcaagtttctttagtggatattcattacctgtaacaaataagaggtcatctagctgcaaatcagaatcatccatggacaatgtaaagaaaaacagatgctcaggacatgctctacctgagtattctaattcaatggtcccaggatccaggtataaacatttttttaaaaaaagctttccagatgattgaaatgcatacgattgaggactactggcttgcaagaggaagtctctgtgttacatacaaggctcaattacccccacttttcagctgacatttcaccttccagccacacaaatccacttgcagttctctacagactatctccacacctttgtagcagccatgcccacccttactgtgggcacagcagagtggccactgtataaggtcgcagctcaaatgaggccttcttgtccatttctgcctaacatccccaggctggcatgcaccaggctgcccttgcatataccttgtatatatattacaacactattacaataaagatacttacatgcttctctcctacctgaactgtaagctcctggaggacctggtctctatgattcctatatcctgctgcctagcaaaacacctgtcatatgataggtactcaaaaaattcttgatgaactaataattgcatccatgtaaataaaaccaatgtagtcaatgttgtaagaaacagactgctggcattattttgagttgaatggaagaaaattggaatggatataatcacgaatttttattcaaatagatttttttgtagtgagctttggattccaagagttacttaatcatcctcaagcatgctacaagagaaaatgcttggggatctttgactcagttagaagcaatgctgcttccattgtatgtctggaactcatttcaagaggattcgtatgtcttcacttctagtcctagatatctctgaaagaaaacccaaaagaaagaagccagcaggggaattgacaaaaacgaagatatattttatgtgcagtttagagttttctgaatagcatttttataaggtacaagcttgcaggccttaaaatatgactcagaacaccaactgtgatgccaacgtttttatttttagactttttagcagagaatatggcaataaatccaagctactcagtctacaaatcctctaaacttcctcctagagaacagaatagcacttggcatttcttggggtattattttacttgcatatatagttatgctagtaaaattttggtgactaaagaagaattaataactgaagctctcaatgattcccatgattactgcttaagttggcaaaatatcctcaggcacagaagaagcttgctgatgaaaatgtgtatgggtggattgttcagtttttttcaccgtgatacacttgcttgtagttatgtctgtgttctgagacaagtggtaagggcataataacagaaggtttaccattttgagagagaaaataggactacagaaaattcaatggcatgataaaaatattttacactttataccaactgtgctttgctgttccacaccttagcttctcactaccctatctctttttgtaaagaaaaaaaatgcttcttgaggtataatttatatccaataaaatgcacctgatacggtttgggtctgtgtccctgctcaaattttaatctccagtgttggaggtagggcctggtgggaggtgattggatcatggagataaatttcccctttggtgctgttctcatgatagtgagtattgtgagatcttgttgttcaaaagtgtgtagcacctcctcctctctaccttcctcctgctcaggccatgaaagatgtgtctgctcccccttcgccttctgccatgattgtaagtttcctgaggcctcccgaaccatgtgtcctgtacagcctgagaatggtgagccaattaaaccttcctttttgtttttttttttttttgagatggagtctcgctctgtcacccaggctggagtgcagcagcacgatctcagctcactgcaaactccgcctcccaggttcacgccattctcctgcctcagcctcccgagtagctgggactataggcgcccgccaccacacccggctacttttttgtctttttagtagagacggggtttcaccgtgttagccaggatggtctcgatctcctgacctcgtgatctgcccaccttggcctcccaaagtgctaggattacaggcatcagccaccgtgcccggccacctcttgtctttataaattacccagtctcagggtatttctgtatagcagtaagagaatacagcaccccttttaagtgtacagactgatgagtttggagcaaatgtatatgcctatgtaaccatcgcttcaatcaacacctcaaagaacattccctcacccaaagagctccctcatgcccttttgcagtcaactctaaccctgatgcctctgatttctatcactaccatctggttttacctgttctaggactttgtattaatggaatcatacagaatatgctcttttcttttatggctccttcacctcaatatgatgtttctgagtttcagccatgttgttgctaatatcagtggtcccttcttttttgctgctgagtagcattttgttgtataaatgcaccacaatttatctgttcaccagctgatgaacatttgagttgtttccagtttttacttgttacaatcaagctgctattaacatttgtattacaggcctttctcttgggtaaatacaaagaagcagtacgacgggccagagggtaagcgtgtttagctttagaaattgccaaactgctctccaaagtagctgcacctctttatactcccaccagccatgtctgacagctctagttgctccacatcctagccaacatttgctattgtcagtcttttacattttagtcatgctgatgggtgtgcaggtgtgcctcactgtagtttaatttagaaggtctgaaatctgtttcgttcagtgtgtaactttttcctctttctaaggaacacaggcaatgtggtatactgaaaggtcgctggatcagggtcgttgtcgtaaattttatcaccaactttgtcattaaatagttgctaacgccgtaaagaccatctatcccacctcatttcttccctattgataaaatagttaattgagccaaatgaggcttaaattcttgtactaagtaaaaatgaacatcaataagttttaccaaaaatatcgcagtactttcataatagtttagcacttttttttttacagactgtcccacaggtttcaaagagaatttgtatattaatatattctatttcatgctataattctctcccaaataccacactttttttttaaggaataagaattcatcaagaaaggagttccattcaatggaaggctccctccttgcctgctgcttccaagctaatttgccaaatcatgaactttgatgtgaacattaatgcattccgtttatagtcatctgagtttaattccaaattgtacctgtttttaaaaaacgtttctgattccaaaagcataagtaatcatccttggtcatgtatgttttgctcactaagctttaaattgtggagtgaatcaattggcaaatctttggatttcatttgatatctgctgtatgcttatacaatatctctttactattgttcagcctcgtatatctagcaatgtaaaaaaaaccaaccaaatccccaaagttagtcttcacctctctgggttctcatagagcaaggtaagggtaaagtaaaggtgaaggcatcgttaatgataaaggaaggaaaatatcatacattctttatgagaaaactttaggagttagaagaaagggtaactaatgattttttaagaggttaacctggaaaggttaatgaccaactgaattgatggctttattcttctaattaactaatgatcaaaggtgaggcagaaatgcatggcaaaactgaaggaaactagttttttcagttccaaggaaatatgcactaaaataaaaaaaatgtgcaaataaaacatctggtgtttgtaggaatacatgggaaaaactcaacactttttgttgtcaattcctgtctaaacaaacaaattttatactgcctatccaagattaagattacacttaacaaaggtttcccatctcttgttctaaagatatctcaaaatatgccaagaaaaaaaaagtaaactttttattgctgacagcaaaaaagacacaggtttcagtgggaggtctatttcaataggaatgggggacactgagttgcagctaaaaaaagatcacatattaaaaatacatatgcagtgtacttcaaagggcctcttacctaagggggaaatgaagaataaagccatcaattcagttggtcattaacctttccaggttaacctcttaaaaaatttaatgaaagttatggtccagtctttccagaaatgattatatggttttgcacagtcccaaagggtctggctctctgaaagccttctgtggagtctttaagggtttaagaacctaggttgaggtgaaggatttctgattaaatgaattcatcaatgagattttgtcactgaaacttgacctatatccaaaaacaagtaggcaaacctctctccaatccaaatgccaaatacatacatggtagaatgtgaagatgacttttttaattccaaaaattatttaacattctcacaggaagtacgtgttcagaggcaaaaagtgagctgtgggaagacagatgctcccagacatccatttcccaaccattgcttcctgaacatcaaggtaagccaacaagtctgaacagtcatttgagggggtggtgtcagttccttccatttctagaataggtcttttctaaaaggaggtattcattgtggggcacagagggaggagtatgaatggctaacaaaaatgtttgtgagcagactgaaaagtgttatttaatttggaaaaaaattcagaactataggtgaaaagagataatttgggaactctgggttataagttatgtgcctgtctgtggtaggcagaataatggtccacaaatatgtccatgttctaacccccagaagcactgaatgtaccttatatggcaaaagggacttctcagatatgatggggagattatcctggattgtcctgggaggtctgatctaaccacaagggtccttataagagggcgtcaggagatgtagaaggcaatgtgatgatggaaacagaggaagaaaaggagatgtgatgtgaagccatgagccaaggaatgcaagcagcctctagaagacagaaaaagcatggaagtgaattctccacaaaagcctccaaaagaacaatgcccgttgacacctgattttagttttctgacctccagaactgaaagaaaataaaattgtgttagtttaagtcataaatttaaacaacttaagcttaaagcaacttaatttgctatagcagtaataggcaactaatatagtctttcctaaaagaaaaaaaaaaggaaggggatgtaaggaaataaagagaagtatgaaacagcatgtgaaaaagcattttctgatgaacaacaaacacttgcatcaacaagactgatactgtctcaaatgtggtcctgagccagcaatatatggggaagctgaggcttaatggaaaaacattaggagttagaaaacctgggctctcatcctcactctcccacatacagctgtgtcatcgcgtaaacacaacccctttgggtctcagtgactgatctgtaaaacaaaacatgtagactagatgaatgataatctctccttaacaaaggccagagggctttccctacagactggttcaaaccagtggtcagttttcccataaaccagttcccataaaccatgtcttatttaattaataagaaatgaatgggcacatttgtcccactttaaagcttcggcaactgaggcttaacaaggtcatatttgtccaccatcactggaatttgaatgcaggcatttcggactgaagatcacctttttatccagtgtacttgcagcattccccggtcaagtttcaagctgtgcgcccaggggtctgagataggttagaatgcaagagcaagagaacaccaccaacacaaaccaggatcataaacatcctagagaaaatgaaagggaaaagggggtgctctggtgagaatgttgatgtccccctgaaattcatacattaaaacctagtcaccaatttgatggcattgggatgtggggtctttgggaggtgattaggtcatgaaggcagagccctcatgaatgggactagtgcccttttaaagattccccacagagctgccttgtcccttccaccctgtgagcacacagcaaaaaggcactgtctaccaaccaaaaaacgagcctcccaagacaccaaatccaatagtacttcgatcttgcattttccagcctccagaactacgagaagtaaatttctgatgtttataagccacccagtttatgctattttgttagagcagcccaaatggactaagacaggggcaaagaccaaactgccttatattcaagcatttgaaatgttgggcattcaggaacgatctttctaagatcactttttaaaagaaacaaaaactttcaagactccaactggtccccggggacagacccccactgttctgtaaggcagaatgccatgttacaaaccagtgaaccgtctttcctccatattcaaattccacaccggacctgatgctgctgcaccaactccagtcttcacggttcacaggaggagaatggaagggctgctgcccaaaatagtttaataaggccagcagtgattcagagagtaataacaggccacgcacgcagacgcctgcagaactgggacccagctgagaggggggttcgctgctcaaggttaaaatggggaataaagaggacagggacattcaattacacgtgttcaaaggagaaaagatcatgagtaccacctgcaaactcccaaaaaggcagtcaaataagaggcatttcagcttgacaatttagtaacactgctctagagtcaaaaaaagaaccaacccatgaaggtaaaaagcaaccttgccaacatacaccctttagaacattttctctctcaatggactctgatttgttactgaataatttcatggacataacaatatgttaagtttatgaatatttaaaaagatgcccaacatcaggagaacaaaaaaaatccagaaaaacatcgagaaaactttattaacagtctcaagctagtctaaaccccaaacaagattcaccctaccatgcaaaacacttaaatcattaatatttccgattatgcttccattcccaagaaaaactagtaattgagcaaaactctaagcttgtgtaaaaaagaaatgttgcatttctatcatttatttatcttaaactccagttgaggcaagtatttgcctatgctctcagttctgatcataagttgatatttaaataattagttatgagaaaagcaaaccaatgggtaattcccaaagttactatctgcttttgctatcaaagtttggaatttcagtcaaatatacagcgaaacatatatacacaagagctatgccacttagcataaatagagtaaaacaacaaatactaagatttgttggcattaaatcagtttagtctataaatacctttatagatgacattagaaaagcaaagtttaagaatgcagatagaccatgtgtgtaatagctctaaaataggaatctgataggaagttaattttctcagctggagccaagagttcaagcttgtaactgatggaaaataaggtcatattggagcagtcttttacatgaaaaattaaatctcaccacttcaatacaggcctcattttaaaaacaccagtatcaatcatctcaacaaatttttattcaaatattacacagatatggcatgttcaacactgatcttattgacaagtgtaagcctgctttgctggatgtctcagaagcaataaccctttcattataatcctttcttgtgtctgagttttaagctttaatgacagataaccgagttcctcagatcaaagacacaataatagccgggaatagaacataagtgaaatgaacagtgtcaacaacacaaaacaaaacaccttcatttactggtagagaatagagtacctgctgtgcctaaatggaaaacaaccctcatatactgcatgtgttatcaaaaacatatctatcttttggcccccaaccactagggagtagcacaaagtacattagggtttcaagaagtctatcatgcaagctgatcttctcaaaatcggattagaaatcaggatgaaccatatcaaggaaactcagcataactacttagacggctttatcctttaaataaatgctgtaaaatagagtttgtcatacagcttacttttgaatggatcttttctggaaatatttcacccttcagaagtgatataatgacacaggtttgaattaggccaattttcagttatgtcttctgttccttggcttgggattcaacatccttggacttttggcaacaggcagatggaaacgccagaaattataattttgctgaaatgccttctttctgggggacttaattatttctactgcatgggtttgtttcattttacataatgcattttcttaaaaattgtatgtagccatttaaaatgactcacaagaacttttagtggcttttcctttaagccccctttcaaaaaatatgtacaaggttgctcatcataaggttgtttgtactagtaaagaaaggaaaacatctcaatgcatagaaaatttgataaataatttgtagtacaactacataataacctataagacatccattaaaatgataaaacaggcatgagggaggctttttaattgaagaaatatatattcacaagaagttgcaaaaatactgcagagtggtccagtgtacccttcactcagcacccaccaatggtaacatcttatgtataactacaatcaaaaacaggaaattaatattggcacactacaattaggctacacagtttactcagattatggtaagctacagaacttactcagaaactcaccaatttttacatgtactcactttgtgtgtatgtgtatatatgtattgtatatatttccataaaatgttatctcatatatatttatgtaatcgccaccacaaacaagatacagaattgtccatcaccacagagaaaactacaagggaactttttacactactagaaatggtctatatcttgacctgggtggtggttaggccatatacttcagttatacaatttagattataaagtatgcttatatctaaaaagaatgatgaaaagttctattgattgatggcacattaggtttttttaaaagttacaaaacaatatttatagaatgattcaattctcacatgtgtctctatgtgcctgggggtggggtgggggaacaccaatatttaattttcttctacaaattctattttatgtattctggcatctattttgcaatgagtatgagttgctttaataaagcagagaaaaagaccaaaaaaaaggtatgttctgtatattctcgaagaaggaatcttttttttttattattatactttaagttttagggtacatgtgcacaatgtgcaggttagttacatatgtatacatgtgccatgctggtgtgctgcacccattaacttgtcatttagcattaggtatatctcctaaagctatccctcccccctccccaggaatcttttttttttatcaccatttaattcattcttaagatttcttctggttgaaaactaccatcttttgtatcactcccctaaaacacaacctctatcaacttcataatgaaggggccttaagttactggttccagtaaaagataaacttgaaaagttcttccccatgaagctgagtgagtaagtaagaacatatgcgaatatttcaaaggaagctgagacagtgaatacaggctgttacttagggctaacttttcctctcacaatccacaaacatgaatacgttctttcaatataacctttaatgaccacagactatgtactaaaattatgcaaaggttctccaagacctcaacatgcacaagacaaagatcttgctcttaacaaggtcaaaactgcaatgcaatacaatgggccaagttcttaacaccaccaatgagaataaagtcctgggagtatatggagaagtaaacagccaattctgtctaggagtgggaaagcagaatgactctgagaaaggaaggaccctagctgtgggccttgaaacctcctatttgggcttctgccaggtggcaaagagaaaatgaaaataggggaaagagtcactctagtcacagagactgcctgcaggcacaaatactttgagggcctgctggagaacaggtatgtagaagttagggaagatgtgaagggatatgattctggaaacaatcgtgaataacatgataaaagtttgcctgcattatcctatatgcagtaggaaactcaaaggcttttaaacagaggactagactggtatcagtatcaaaagtgagttggaatgagagaatggaataggaagataaattattgagctcttaaaactatataccgggtgaaaaacaatgaggtcctgactagaggcagcaacagcagttgtcatagaaaaggatactgtattagtccattcttgtgctgctaataaagacatacccaagactgggtaatttataaaggaaagaggtttaattgactcacagttcagcatggctggggaagcctcaggaaacttacaatcatggcagaaggggaagcaaacatgtccttcttcacatggcggcaggagaaatgccgagcaaaagggggaaaaggcccttatattataaaaccatcagatgtagtgagaactaacttattatcatgagaacaggatggagggaacctctcccataattcaattttctcccaccaggtccctcccacaacacgtggggattatgggaactacaattcaagttttgtagcagctttgggtgggaacacagccaaaccatatcagtaaatttttatttcaattgtttaactattatgaatgggctcattctgtatataatccccaatttgacttttatgttcaacattattcttgaggtttacccataaggatacatatagttttagttctttctgctttatagaatttaatttactgagtccattatagttatttatccatcttactcatggacatttaggttgcttccaatgtttttctctaacaaacaatacagcagtgaacagagcatacatgagacgtcccaatacatgtgccacacttttacatatctggaaatagaactggaggtttatggtgctatcaggcataaaacatgaaacaccttaaacctaactaattacttattaccaaatcattctccaagctggttgttccaaatgatattgccattaataaaacatgagctcccatcttacatgtctttgcccatacttggtgtagtcaaactatttaatttgaacaaatttgtgagtgtagaaacgatattcttgttctggttttatattatgcttccagaatcgaaaggtatttccaaagtataatccatgaattaggatgtggacagtgaaggacagagaagaaaactatggagtgttctgcttgggtaacaaaagtagaaatatctgttaggaactacatttaactgcaaccgataagatacttcctccttatctccaaatggtggcctaaatatacaagggcttatttgctatgggctgaaagtttctgtcccgccaaaactggtatgttgaaacctaatcaccaacctgatggtattaggagttggagcctttgggcggtgatcaagtcatgagggctccccctttgcatgggattaatacccttatgaaagagagcccagagagctgtcttgccttccaccacgtgaggacacaaagaaggcatcatctatgatgcaggcagccctcaccagacactgaatctgccagcaccttgatcgtggacttcacagtctccagactgtaagcaacccatttctattgtttataaattacccggtttatgatatttgttatagcagcctgaactactacattgccacatgaaaatccacaggtaggcattccaaagctgatatggcagcttcatggttataatgaccaaagatccttctatcccagcttcaattttcaaggtctccttagggaccaagatggcttctgaaactctagtcatcactcaaatttgaaggccagaagaaggaaaagttgaagagcaaaagggtatacctcccagctgaagttgtttgtttgtttgtttgtttgtttttaggcttcctggaagtcccatacaatactcctaaataacatacacaggcaagaccttagtcacacggccatacctagctgcaaggaaaactgaataatgaggttttgttttgatgtgtgtgtgtgtgtgtgtgtgtgtgtgtgtgtgtgtgtgtgtgtgtgtgtgtgttttgagagcaaaactaatgtggccaagaaagaaaaaaaaaaaagattgttattaaggaaaaagtatataatgggaggcaacattatttgacatagtaaatgatgtgattaattaagatgcagaacacaagaacaaatgaaacagagtgcaaggggtaggaatcagtgtagaaataaagattaaagaatttttagcacagagatattggatgaaatcataggaacagttaagatagcccaaggaatcagcactgagcaagaagagatggtgaggtaagtatcccaggaaatgcagtatttaagagaaagaaagagaaaagataaatgaagaaaactaagacatcaagaatattcagagaaggaagaacaacactgtccataatccaaaggaccaaggtctctgaggatggaggaggtgtaagctactggtaattgtctgcccagtagccattctcctgtgcttctttgtggctgacaagaattccaattttgttcagctattaggaagctatgtgcttgaggagagcttgggctcctccccaaccccagctgtaaatcctgacaattctaaacctatcaggtaaaatcccatttccccttgctattgattggcttaagcaagtgcatctgaaacaatcctggccaatggaactctagggaaagtttgggaaacaaaaagttaacatgttgcatgttttaaaaaattaaacacgcaggaagaaaagactaaagaaactgggtccttgaggacacagtcaacccactgaattaagcaactctggaacttccctaattttagactttttaaatgtagtttcttctatttgggttttccattacttgcagccaaaatcaccctaatagtcaacagtatcaaacattaacaggccaaaatgtcatcaagaggccttgggagacagtgaagatttagaatggaatgacccagttcagtcactgagaagggggaaaaaatcagtaacagggggctataactaaagttaggagggtgggaggaaagaggagggagagcattaggacaaatatctaatgcatgcaggtcttaaaacctagatgatgggttggcaggtgcagcaaatcaccatggcacatgtatacctatgtaacaaacctgcatgttctgcacatgtatcccagaactaaaagaaagaaagaaaaataaatacataaataaataaagttgggagaatttcttcctattgacttctgtttctagatgaaatgaaaacaagttcaaatgctgcaaatgagattgtgaaagaaagttatattcttgaagagcataataaaggtttgaaatagctgctacaaaaaaaatgggaaagggtttgaactttggatctgaaaatatattttcagatcaaaagcttctgttaatattaaaatcataaatttgtaagaaagccaataagcagagtggtaaactgagtacaaagacagaagaagtggactgttgtgttgaaacacagttggagaaagaaatgaatcctatagaagatcaggaggtgtagaaattactggtaccaatgacagatcatcaaaagggttgactatatagcccaggtacaccaggggagaagtaaagagtgtggaagagtaaagaccagacaggctgaacagggtgcagatcagggaataaattcacaatgagtctgaagaaaaggtttagtgagagaaagcagatgggaaagacaggggccgtgatggaggaaagggtatttcagagataaccatctcaaagtgagagcaccagtgtttggccactggagcgggcggctgaggtggtatgggaggtacctaaaaccaaggagatgaggaacggtgaatgaagatgtcaggtaagtcctcaatataagcacagcagaggataacaacaggccaggaactctaaggcaaacaggagacagctacaaaccaaagctcacacttcccacatcgctcttcttaacatttcttccttttttttctttttttttttgtgtgtgtgtgacggagtctcgctctgtcgcccaggctggagtgcactggcgcgatctcggctcactgcaagctctgcctcccgggttcaagccattctcctgccccagcctcccaagtagctgggactacaggctcctgccactgcgtccagctaattttttgtatttttagtagagacggggtttcaccatgttagccaggattgtctcgatctcctgaccttgtgatccacctgccttggcctcccaaagtgctgggattacaggcgtgagccaccgcacccggccaacattgctttcttttaaggagaattctatttgccttagcaatagtttcaggtagatgacctttcacatatgtataagaaatgttgccctgaaccctgggaaaatcctaaaaattccagtctactatcagataactcctcctaattgggtcttacttcttatcaatttagaaaaaccctggaggaataaaatgagaaaagtggagatgaatccaatgcatctaggatatttcttaaagtctctactcccaacatttcccctctttctactcctgctgctccctgccaggttcaggtagcaattatcatctctcgcctacctgactacaatatctcctacctagctttccaaggtgtagtgagctctccccactaaatgatgccacacacagttgccaaatgaatcctcctaaagcatctctttgaatactcctctctatgcaaagacctgcagtgactcctcttcacccagagcactggctttcaagctcttatagcacctgcatcccgtaagataggtgacagtattcccaccactaaaatcaagtaatgacaatctgttctcccacttgaccataatcacacctaatagaagagctctctgatttagcataaaataacacatttagttatctgaagtgtaatacatcattgcatggaattctaaatgcaaaacttgtgaacaaatgatgtataaaatgaagtacaactatacagtggtggtattgaaggcctcctaagcgccaactcaaccttcctttccccctttatcactcacattttactccacttatcctaaatgcaagacaagccaggcaggctgtatagttaccagtatccacacttcagtgtcattctaaggactcagggctgtgttttgctcacatctctctttgtaacacataacgcaacagaaaagaaaaagctttgttctgtgaggcttgctgcccatctgctccaagtactttgggcaccaccagaaatgtatgttgtgtccagctgactcaagaagccttcccttaacaatatctcaagatgctttttttttttttaacctcagaactttataagaaaacaaacgggctatttgaaaagaatgaatttcataccatacggaatgaactaaaccacatttactaaatagtcaatctaaacataggtattcttttatacaactaatataatgaaacggtagttctaaatacagctaagggcccccacacctgaccacggcactaagtgcacttgtagccaggagtgcctgaagccatgtctgtctggtgcctttccagacactgcttctgttgtttcctggatttagatccttcacgggcctcttctctgtcatggtaatccatgcattccacgctgatcaccagcagaatagggaatcctgctatcaggtctcatctactcaaccatagagaatttagagtccctgaaatattaggacaaatgcaaagtatgaaagcttctgtgtttctatggtgatggccatttttcttcctgttaggtgcaagccttcagttccttttctgaaaccttcaaggctaggaatattcaaaatggcttttttaaggtaatacaatacatatgtcgtatattttataacacctccagcagggcctagagcagcacctcacagtcaaaaacactgatatttttgcacgtatgaacatccctattaagtgggataacgatcatgaatagcctcatggcaggacagggcaaactttgccatcaaatgaagtccacaaaaagcccaaaacctgtcactgtacagatttcacaacggtgattaagaaactacattacaaacaactgtgtgacactggaaattaaggagctgagcagtgctattgcttcttctgcaaaggtaagatgctatggcaatgcctacctgcaaaggccatcctctctctggctccaaacagaacaccaacccagggctagaagaaatgcccaggtaaaatggaacatcagaaagttttcccacattatgctgtagatcattaagtccttactatagtctgtcctgtctatggcagcccaggggttcgtgaattcactaatttatgtcccttccatggttgccctggtgcagtgccatgcccagtacactggctggatccatgctgacgaatctgaccctctcactccccaatactctaggtcacaccacagcaaatcatgacacagtgaatgagacaagaatactgaagctatgaggcagcctgtacatatgtgcttgtaccttaaaggcttaaaggaaggacaaaaaacatttcagtctgttcatttagttatttcattccaatacaaaaagcagtcaagcaccacattcataaattgaagtttatcacctcaaatcttacctgcatagtttctatatttgctttggtgggatattttaatgactgaaataacagcatacctttctaagaagagttccgttaaactagataagatcagagttaacactataactctgtatctctacatatctccaaggaaacccatatactattagagtcatgctaagaaacagattcaattttgaaacagatcaggcaagtggaatttactaaaatggaaatgtgactctaagaaaagctttcacgttccctggtgctgactatatcttcactatgacatgactaaattggatggactgctgaagatgtcattatccagaataaatatcataaatagatatgccttcggttggtccattttgaatcttgatatttatcattgtactccaccagataagtcaatttgtgaaatttacttatgtttcagattaaacacaaactggaagagacaataatagttgaattaagaatcctttacttaatcagtcttcctggcatggacaggagactataagtagtcaataatttcctttcatcggcaaagaaaaaccaaggaagaaatttaaaattttccagtctaaagtaaaaaaaaaaaaaaaaaaaaaattaagaaaacatttttattagggagaaaccaaagattaaaagttatcttgacttgaagagattactggattcttcatattctaaaataagatgtctggttacaatagtggctgtaacacctcctaaagttattgtgagactttgagcaaaggcttctattttctcatttgctttaaacttacctgatcattactgggactaagttggtgatgttaagaagaaactccaagtgttaaaaatgccatggtggccgggcgcggtggctcacgcctgtaatcccagcactttgggaggccaaggcaggcagatcggaaggtcaggagttcaagaccatcctaaccaacatggcgaaaccccgtctctactaaaaatacaaaaaaaattagccgggcatggtggcacgtacctgtaatcccagctactcaggaggctgaggcaggagaatcacttgaacccaggaggcggaggttgcagtgagctgagattgcgccactgcactccatcttgggtgaaagagcgagactccaaaaaaaaaaaaatgccatggtgatgtttaagaatataaaatctcaataaaccaaattatcctctccctttcaaaagagaaggaatgtcaaaggttcttctgtatgtgctattttatccaaaggtttgtaccacaatatggtatttgtatttttcttatctagcaaagtacataactcctctataaggcccttctcatttgctttaatagtgacattttaaatgaatgaacaaccacatcattctcaaaaaatattttagaaaccagaaaacaggaaacaataattctggcccaatggagttaacatctgattttcttttcctgatagattccatgactagatttttcctcgtatttgagaaagcagcattcttaaaccaaaaccgccactgccaggtcctttggtggcaaaccctactcaaaatttgattacttgagtatcaagtcttgggtggagtttaccacctatattatcttaagtaatattatcacttgataataaaggaacaaataaaaaagaaaaacacttcatttcaaatctagtaccatttctcttccacatgataatccttccctccttcaatcaacccttcttttttccaggctaaacatctccatttaattcattcattctcccacaacatggtttccagttctttctccatcctattcactcttctaatggcagaatccatcatgagtatgtgctctgaccacctaacacagtgtcctgtatatttattcattcaacatagacttagtgacaccaggtattgatattattctaggaattggagatatatcagtgacaaaaatcactgctatcttaaagcttaacatctcatctagcacctagaacaaggccagacacaaagtaagcactcactaaatacttgttgaaaacatcctgcacgaagggcagtatctgaatttgaacacaatgattccaaatgtggttgaacatgttgaaagtggcacactctgatacggtgaaatgattactggcagcaaggggaaaaaaatagaagtacacgtaagaccctgaaaagctaagcagtctagagtccctttgcaactcattttatagcttgaggacataactacattaatcacaatgtaagaggtaagatgctgattgttcgttcataagaggttcgaattatgttaaggctctgttcaaagaaagaatacagtggagaatacattttagagtgatgcataaacagttgatttcaaacatttttatttcttagtacttgttccagttagtattgttaagtaacaaagtaccccaaaacatagcagctattttatctggctcataatttaaatggtgaagaattcaggaaaggctgggctgggcagctctggctcagggtctctcatttgatggcaatcagatgccaggtggggctggagctaggtggggctagagtcatctgaaggctcagctgggtaggtgtcctaggtggctccctcccaaggctggtagtcaatgccggctgtcagctgggagctcagctgggagctcagctggggctgctggctgggtcacctacacatggtttctccagcatagaatctcagagtagccatacttctacttggcagttagcatggtcagagctaatgtcccaagagaagtaagcagaaattgcacagccttttacaacctagactactaagttgtcacatagcgttatttttgccgtacttttattggttggagcagacacaaaccaactcgtatttaagagaagggtacacagacctcacctatcaatgaaagaacttctggtcagtttttaaaacttccacagtgcttaaaggggtaagtttccattagttaaaaaaatgtgtttaggtagaagactatattttagatatgagacattaagagggaagtaacagacattatctgttattttgctcagtacaagtatcttgttttgttgaatacgctaagcttaactgaattattagcctaacaagagggttacaaagctgcttttggactttggactcctaagcaacaaaaggccacaccaccagagtcctgccattaagaagggcaggctcaggtccatcttatccactccatgtggcaaacatttctccctcctctgctcacatcattttttatcatatgctttggattcatgagctgaagtagcagggatgtgtgggagaaagagaaagaggagagtgaggagagagagaaattgactccatctatatcatctgctttgtgaggataagaactgtcttaactctttttctttcccacaacactcatcaggaatccaataaaggtttgctgtttggcttgtgctcaaaacgaaaaggataagcattattgttcattattcttgccgctttcatgtctttaaattgtacaacaaagaaaacaatctgtaccacagaaggctggactgctgagttctagcaaggcatagagctgtctaaaaacaaagtcaggagtgccccatccttgatgatggtcaagtcaaggtgttgtagaaaggagtaaaacaacagatggaggttctaagattctaaggtcccttctaagaaagccttctataattccataacaaaggatttagaaaataaaagcaaaactgagttcctataaatgtgtgggatgtcactattcactatcctcctgccaaaaatgtattaacatagaaaaaaagacagctaggaaattctctgaataaagctcttccaggtagagttcaatggctacagaaggaatcagctcacagcatgtgtgcagcctggctttacccaggcaccagaagcctccagagcatcactcctgactgctgcttttgctccccacgtgactacccctgaaagctgcatatttttatttcacagaaactacctttcctcagtccctatcaagaaatgaatttcaaagtaacatttttagcataatatttaatccctaaccataccaacaacttatctatatgggtaagaaggaagccaaatattgccaaaaatatctaggaatcactatttctgagtagatagcacagtatttattgaaatttgaacattagaaatatgctacaaactaaactataatctgaacacaagtaatatatgcatgtgtatatatgtatacatacatatccaattaaatcacacacacacacacacacacacacacacactcattgcatactacccatgtgccagattctgtgatcggtgttggtaatttgacactgtacaggggaacaatataatgtccccaaagagctctatccattcactgtgtgccaaagatgcaagagattatatcacagattaagctttaagaatgatttttttaatccaatgttcatttctaaatctttttcaagaaataaaaaaatcaaactaagacgacctatcatataccatacagcaagctcacagacctatatagaaatcccttgagctggagctaacaacaaggacacatcacagagaaacggtctcccttggctacggaagacaaagcgagagagagaagattctcaagtggtttcaagtctgggaatgatagcctaaaaagaaagtcttaggagaagacagaaaagtattttcaaatatttgaagcattgttgtacagaagacatcagacttattctacttcagaggaaatagctgaagtacttctatacaaaagaattaaacttttctattaatacttcagaaggtagacctatggcttacaggtggaagtcaaagcaagcagatttacctcattttttttttaaaaagacccttctaacaatttgatagctcacagctggaatgggtttcatgcaatggtactgagtcactgaaaaagctttcagaggctaaatgatgtccatcagcaaagttgtgtagattacagaatcagatggtgtataggattgggtgataatgcaataccttcttccagccctattctattatccattctatggaagaggatgtctccatcttttctttgagtaaataattcccaaatcatctattaaaaatctcaggatccttaattctacatctttacttggtatttgtctacctaggctaatactgaagccagctaatctcactaagccctctgtcatgaagagtgaagaaagacatcagaagtatcttaactgagagggtagatggaggtccctcaggacaagctcttccgaggtgtggatacaaagtatatggctgaattatgagtcatcacaggaaatcagttgttcgtaataacaacactgctcctagtcaacagaaacagaaattaattaaacaatttccaggaggaggttttagatctggcttttatgatgttaatgacttatcaaaagagtctgcatatcatgatgtctctagacttctacttctttatttttcctttgtaaactgtgtcacaccaggcgtatctcaccatgaaaacattgtgagtaatctcaccacactggggagaattcatattagtagttgagcgtaaattcacctagaatttatcaatttgcttattcacgttaacagaaccacattttacacactgtataacctgccattttcatttaacaatgtattcctgacatctttccataatatgacatacagacctacagcatagcttcacagtattcatcacatactgtgttccaccaagtctggaacacactctttctcatattttaatatctctgacattgggtgtgtctcacatttaacagccatcatagtttacctggcagcatattttccttcctcagtgggacattttctttcttagtggtacataaattaatgggggatcttacaattgacagtctttgattcaatgaaataggttagctgaactgtatataatcaatccattttggatgttggcagcagatcctcttgatgtccccttgtcatattccctccacccacctctgatttcagccattgccatggcggggagttcagagtagggtggcctcaagctgacagctcccactaaagacagcataagtgtctcttttgtccccagagccttctttgaagctgggtggcatcaactcagcctgaaggcaagagtgacccagaaaggcggaagtacaaatggcccagtgcacaacctcaagcagaggggtacagggatggctgtgtaaatgctctaactataacacactctgttattattgactttctccttccctgcctctctccccgctccctcagcgctgcttcctaagatcacctcccaaataaattatttgcacccaactccttgcttcaggctctgctttcatgggccccaaactaagcccaggccttatggactatttcaacagtctccaatttatcaatacttcatgcttcaaaaatatgtttataagtcaacagcttggaatttgcaatccattgttttccccacagaaatgctattataaatgattagattcataagccaggtcataaaaagtattcataacagcatggagtgccagcacaaaagctcctaagaaaacatgtcattttgccacactgcctttctttaccagaataaacattagtaatgcaattaaggctccaggaacaaatatccatccacgttgacatgtgcatacaaaaatacacacaaacacacacacacacatattggtgaaagcagatctctagagaatcgaaatgcctgtatcaatattcatttaagtccttataactagggcttacaacttgaaatccaagaaatatagaaagagttaaactcatcaaaggtctcaaaagggaaaaacagaaactatttagttcaatacacaaaacatgtaggccgggcgcggtggctcacgcctgtaatcccagcactttgggaggccgaggcgggcggatcacgaggtcaggagatcgaaaccatcctggctaacatggtgaaaccccgtctctactaaaaatacaaaaaattagccaggcgcggtggcgggtgcctgtagtcccagctacttgggcggctgaggcaggagaatggcacgaacccaagaggcgaagcttgcagtgagcggagatcgtgccactgcactccagcctgggcaacagagtgagactccgtctcaaaaaacaaaacaaaacaaaacaaaaacatgtaaaatttcttagccaaagatgttaagggtgaaatgaaagaaagagggtcattcagaacaaattagtgcagaattaaagtggttatgtaatttggaactcaagtcaccacagaggactgtttaaagtcaatgctcaacagttagaagtctgttacaaaatcagaggagactgaacttgagttgaaaaaaaaaattaagcttcatattttatataaagctaagccttaaatctgaatgaatggattaaagttgcatttatatgatattgtgtcaaagccccattaaatgatcatttaatattcaaaacaacgatctccctccccaccaccagccccaacaaaaagaaagaatctcccaaatcaaattattgattgtagcatcaagaggatggaaagtaggagaaaagaaacgaagaaatttgagattatggaatcagactgaaagaaatcaatcaaaatcttatctaaaaatatttgctagtggcctaatgtaagtggatccttaagtggggttttttcaaatttcttaaaaataaaaatgcctttaagtaaaagcaactccttgctcaagtaaaaagtaaatcaaaatcactttttcaattatgcagaatttatatgtaacttcatattccttctggtaaaaagaaaggggaaaaatgaaaaaggtgaaccgaaaaataaatcactgaatgttattaaatatatacatcaaatccatgactacagatgtgggcacaaaaaataaaaacacttttagatccaggaaagaaatctggtttacaaaagccagaagactattagtatttatgacttaaacttaattattgtgcatatacacaaatcccttccccctacccacacacacaggattttcttcccccaagttccccaatttaatggtaaagacgtaagctttgagcttaaaacaagaaatattctttcattttgttcttccatgtaagggctgacaaacacaccacgggggagaaacctgtattaatgatcctcatagcttgcaagaaaaactattaatttcagtctaaacaaacacaaacagggacaaaacattctagacataaacctgctgcagaagctctccaaaatcacaacacccacggtacatctttcagctcaaatgaataaacacttccagtgagacctcaaatgttttcttttttttaaaacataaaaaggaatcattttattccaacatgaatgagactgtagagagctctagtactgttgacagcaacacttcttggggatattattaactggattataacatctaataactaaaaggaagaacacgaatgaatgtagaggggcctccccaccggccattctttcaagcttcaaaaaaggagctcagactttgagtaaagtcttagtcttggaatgcaataggcaggaggcacttgaactacccagacactgaaatgatgcacaaaattctgctcaataggctgatatttcatgtgggttaggatctgtaatctaaacagaattaagaaaaaaaattaagaagctaagcacaacataaatagtccaactttttattttaaggacagagaaactgaggcccacaaggctcaagttttgcccaatgtcatgtaatcactaatcatataccggttatctaggtctcctgacattcaatacaatgccctgtagcaaaccgaaacctcagaaacctcagaaggtatggtctaatctaacatgtctaaaatattatttgtaatacccttaaagaatatcctgaaattggatgaaattttagatgttgctctataaatatggaaagatgctcatatgagccacctttggagactaggtactcaaatttatcatgtatctcaatacggttcatgccaggcatatgtatattcacatgcaaaatcctgcaacattcttaactgtgcattacatcaactctatagagattatggtaaggttatttccaggattctaggcctgccctaccaatatgcaaaccatcagctgaatctataaacaagagtaccatcaaggttcccagatttaaaatatttccctacccaattccctatcaaccccgcttcccctccccaatctcatttaaaataactctgggatggccaatgcctgtaatctcagcactttagggggcagaggtggtaggatccctggagcccaggagttcaagaccagcctgggcaacacagcaagacactgtctctacaaaaaaatctaaaaattagccaggcatggtggtgcatgcttgtagtcccacctacttgagagactaggataggagggtcacttgagcctaggatttcaaggttgcagtgagccatgatcacaccactgtgctccagcctggacgacagagtgagaccccgtctctaaaaggtaaataaatacatactctgggcttttgctaataatactatcttaaaagattaaagccttcacttaagtagttttgcttcatcactttaattattctggcaacccatctatagttcaattctcaatatgccatcatttgtcagctctgccaaggagtaagccccatctttcctaaccaagcaactcttccctggggtttctttcaaaaaaaattataccagcaggttctaatttcctatccctgccagaaaggctgctcagaagttgagtttaaatgtgtcttattaaagtattgtgttaaaaaaaaaagtattacgtatctgctgaattgtaatcagacttgaataatcatcttaaataaaagtttattaattgaacattcattattactctcagtatgaaaactaaatagatcatcagaaaaagaattaggcacattaggaagcagtcagattgtatcagtgatcaaacagttcagacagggaaggaagcttactctaaacagaagctgcagatttgtatccactacctatttcagatcctggtacagtaggtgcccagtaaacgctgaacaaatgaatgaaaatagaactccaagtcacttagatcaaggcacaactggagctccatttaataaatggtcaatgcctgactctccattaaatgttcaacggcatgaactagaagcaggcagcatgtatcccaggaatagcttttgctacaaaatgtgagacaaaacagctcatgaagaaaataatccttatggtaatcatcacaatgatgatcaacagtctggaacactttctcaatcaccagatgaaccttagaacaaactgagagaaaggggtctgggtacactggaagtggcagctccaaacaggccctgtgaagctcttcatccaagaccttccttcctctttcatgatattccactcttctactttctcccaaaactatctttttcatgcaggcaaacaaagtagcaataatgtccaaacacagaatcactcaagccaaagtactctcctgagcaccaggaatcatctggctgtgctgaaaagtctgtccaaacactttggattaattttttttctttttgcatattaaggtatttttagacgtgaagttatttattctctgcaccaagagaggcttactttttaatcctttctccataaggatgtcaaaatctttcagtcccaaggtaaggtatcagaccaaaatagctttaaaagttctatataattaagaatgttgttatagctactcttatgccaagaatcatctacactgcttcaattcatataatcatatccacgagagacccagttaaccttggcatttctgctgcaaacaaagtgtttagacaaacagcactctctctatcccaaccatgttactcagtgctgcctggtcaattctcacacaaatcagaaaaaaaaaaggtgtggggacagagggggccaagatgtaaaaaggcaagtctgcaatcctcctgaccccatctcctacaaataaacttaggttcttccaacagtacgttgaaaagaattaaagatgtggaccctaaacaaacaaaaagtcgttttgcattgaccctctctttaatttcaaacctggaaatttttagcaggaatatgatgacaaaaccacattacctagaaatcataaaggtggaagacactttgaaaaggttttttggaaagagcataaaaagtatcccatggggtctgataagtggtccttctggccaagggttcatgctgacagtactaaaggaatggatctaaggatggagtagagggtgagcaaacagggcaggcaagggaaatgtgatcatgccctccataatcacagcctcaaagatccataatgtgccttggttacctcttgattctcagtatctgaccatttgtcaactctgccacggagttagccttatctcaagtttcatgaaagcagggattttcttttgttcactactatacatattaccaacatttgaacagtgtctggcacataacagacttccaaaaaattatttttgaattaataaagttatagttcaatcattcatgaatttgctgaaagccagtagcaggttaatttaccagttaattccccaccaacaaggaagaaagcaaacttttcccataatgagtttgggggctaccatgtcatttagcaattaatctattccaacaacaaaaatatactgagcacttacaatgcgctgggaatttttccagtgctgggaatacagtggtagacaagatacatgttgttcctgctctcacagagcttccattctagtgattctccctggctgttctgtggaggagaggctactggggtggcctcagggcctttgcacttcttgttttctctaagtagatgtttgtgcagtctgtgcttcccctcttttttcaggtttctgctcaaatgtcaccttatcagagaggcctttggccatttctatgtaaaatcaaacagcagcacccctgtcccctatacactctaacctacttatccctgctttaatgttctccacagcacttactatcacctgacatacatatttatttgcttataatgcaaactccatgagggcagggactttgtttgttgttgtatcccctggacccacaagggggcttgacgcattagtaggcattcaataaatatctacagaatgaatgttttttaaaaacatacaatcattgagcttcttcagcacagccactgctgtgcagtttagtcactgatctttcagatctttttcactcaaactagttcttggtcctgctgaggaaaccctatgagtttctcatttgtagctatgagattatgcaaaccctaagagtataatttccactttatattctagatcactaatgaaaatgcccatttccatcaggtcctggatcagtctccacggaaaatactcactgactcctcccaggatgaaagtgacccacagtcaacatctggatgtgaacgcagtgctgattcccatcatgcataaacccacttagccatgaaagcttcaataaaactgctctgtgactgaaatactgcaaagcctgccccagggcaaagcctgcccctgactcagcctcaaaggtgccaactggctcccagttaaccaacccttccctgttctgagatatttccacatgcgcaaaggatgccagtggatagaactgttttattcattaggggataagggtactcagaaaagaatacagctaatttttaaaaaccaatcctgcattagttttctctactctggctttatgtcccacctgcccattccatgtatttgttgttacgaagaactgaagagtaaaacactggaagagtaaagcagtagaattaccatgttcatagcttcactatcaaatggccatcttcctttgtcttacgcacatgaggcatatatacatctatcaaggaagattttctgtttataaagttagtctcattgttagacctcaaacttctgattctttgtattcttccttgtaaaacaggcctttttctgcattttgaggtttttcccatctgtcttttagatacttgtgttaccttaataaaattttatttttcaatggagatatactgttttgtttctttataagaaaattcaggttttatccttttttaactctttcacccttcaaccattattaatttcttctcatggagttcttttagtctgttgaaattcctttttaaaatgtgttctctttgttctactgaatttctagtttttttattcattgtctgttccatcaattaaagtggtaagattttgggcacatccctttacaagcatgagttctgtctgctcatcagtataactagaataagtcatgctatctgccttgcctggtgctatgcaggtataagactaagtaggtagaactgctgtttaagccactcttgaaagtttcagtctctgtacttgaataggcccattgcttccaataagagaggaatttaatactctaaaagaagggggccaatactattaaagtcacattaatctacactttgcagagacatggcagaacagacaaaaaaaaaaaaacctcaccatcaaatccaatgcctgccttccggtcaattaaaaaagcaaaaaacaaaaaacaggattacagttccaaatgccccaaacaaacaaatcttcaggttgcattaagcaaaaacttatcaagccctcaattacttctttcgtaatgaattccaacgtttccacctagggatagagagtatgaaaccaagctttaatctaggttgaacagctgaaatttgatcatggtggtaatagggtactcaggtaaggatccagataaaattgataataaacatgtctccaatcactacgcttcaacttgttttgctttttgtccttttactaacaaaatatagtaaatgtaagttatttcttaaataatacacttaatgttctctaatatcaaccactgaattattttgcttaaattcctgagtctcaactttctcatctgtaaaacacaaataaaaactgcttcctcacttggttactgtgagaacagcaaccaaaaaggagggagggcactcagatgaattcaataaaacctaaaaaacagactagaattcaagtcctccatgatcttgttctctcaggaagcaattaatataatcaattctgtacttgttttatcagaaacatgttcatttcccagtttttgcataaatgccatcatacactgttttacacattcttttttccatttaacaataaattttagagactgttccatatcaataaggaggaagctcccccattctctatataagccattatttacttaacattctcccacatttaggttatttccagtcttttactgtcataatcttttgctcacatataagcatttttgtaaggtacacttctaaaaggagaattgttgggtcaaaaagtatgcacgttttcaatttttaaaaagattgccagattgtcctccatagaggtttagagcaatttactctcctgccagccataaatgaagaccatttctccacatgctgatcaatataaatctcttattaaacactgttgttaaatctcagtcaataggatagtaaaaaatgctatctccatgtgttttaattgctttttctaatgaggttttttggctttttttgattgatagtctctctttgaatattaagaaaatctatttcatgccctttaactttcttcctttgtattactctgcacattctatgatccaactactctgagccatttgctattctccaaatgggctacattttgggaaatgcccattacttccaacttcacttacaaaatttcttgacagtcaagttcaaaggcatttcaatgtttatgaagtgttcctgtactcctctcataggacttaatcactccttcctcaagagtgcctagggagcatttttaacacttcataacagtatcacttcactctgccatgtacacatatgaacttcttgaaggtccagattatattcttcatcttagcattccctgtgatattcagcacattcactcaattaatgtggcatggaagactgaattaaaaagactgcatttctaactgcatatgtggttttcaacttccaaaccaatattgtaaatctagtgatggggataataaaataaagtgaagatctgcagacttgttctttggcctagacatccatatcaccacttaaatgctgatcatcttttctctaagttttttgtttaatgtttgttttaacactgaaattctggctgggacttgaatgactaaaggacctaactaagatcaaagtattaaggggattacagacttcttttctataatccatgaattgtaagttttaaacattcactagaatggctaaaataaaaaagaaaagaacaagtacagatgtagagcaactagaactatcataaactgctggaagaaacgtaaatgggcacaaccattttggaaaactgtttgggggaatcaactgaagctaaacatatgttaactctgtgacccagcaattctactccttggtatatactcaataaaaacgcacacatttgttcaccaaaagttatgtacgagaatattcacagcagcactaatcataaaaaccccaaacagaaaaaaaaacaaatgtttatcaatagtagaatggataaataaattttggcatattaacacaatgcgattctaacagcaataggaataaacaaactaaaaaccacacatcaaaatatgagtgactctcacagacctaaagcgttaacatgagtcaatttacataagttacaaaaacaagcaaagctaatctgatggtgttacaaatcaggatggaaattacccattgcgggtagggatagcgacttcggaagagctggtaatcacctgtttcttgttctggacgctggttacacaggttatttatcttctgaaaactcattagattatatgttgatgctttgtatacttttctgcaggcatattatactttaacaaaaatgttcctaaaataaatcaataggtgaaacttccaaaagaaaatatattccttttaaaatgccattcaggaataaatgtttttctaaatgctgacatgcttatcggccacttgtaaaacccagctgacctggactggtttgaccaaagagcctaccactgaaaaccgaacttgaacaaaaaagaattttctatttccgaaacaatgcatgagtcacaaatggtattcaaattttttgattaagaataaagtgaggtgaccaacagagatcagctactgagagtaggcaaagattgcagagaaagataaaagaaaagaatttccttaaatggtaccaaaatagctattactcttaaatgaaccttctgttgaactactaagaaaaaaaccaattatttattccaatgcagatatatgcctcagcacccagcttccctcccaatattattttataacactgcacaacagacaaagagagtgtgagagtaccacaggaggagtaatcaatggcaactgcaggtgtctgaatagagggaaactaagagaaatgaaacacagatccttccacctcattagtcttctaaaaatattctcataatacaaaggcatgccccgctagtgtggtatataaatgaatgagaaacctaatcaaaatggtttttatgaatcttgaccacaacccacgtacaaatactttggagattaaaaataggaaaataaattgatggtgctaagctagtcaagcagagcagaaataaatgtggaagctggacaacacaaaatcaatatatcgaaaactcaattatctgtgctaatggaggcagatttttaaaaatcttttccattgggctgtgaaatatagaacaggcactccgagacagatgaacaggcccaaacacttaccctcttctgaacctggcattcattcatttttaatttgatcccaacaaaactcaaaaggaaagaaaaataaaaagatgtgaagtctaggtgaccaccagtcaccaggggtgacttcacagccaactttaaacttcctgttgtaaaaggaaacacaaaaagataattaactgaatttcatagataatccatcacagttcatcttggtcaatgtacaaaactggttttgcacagaagtatcaccaagtacatagtccctccaaaaagaaataagaaaaaagataggatgctatcaaggttttaattacacccctcgatcttaccttgcccaccttcgggaagtggttctaataagcagtgaaatttgcaaaaggcaggtagcaacaaggaaaaccagcaagggatatgaataattaaacttcgaaataatttttttaaacctggaacaattctttgttcatgtaatgatttttttaaaaaaaattcttctcccccttacaaaaggaaggattagaattaaccactaacaatgtaagctaagaatggcatgaagggaaaaaggaagataccttctttccccacaacagcaaagcagatttattaaggacatctatgtctttaataaagatggtcttttggctgaccattcagccaaaaccaatcataaactgtctaatactgacctggttagtattagaccagtatctgactaggatcaggggagagaggctcaccatgatctagccacatctagttgaaattaaccttgaaattaacaagaagaagcatctgctgaggtcctgctatggtctgaatgtttatgtaccccacaaaaaccatatgttgagattctcacccccaaggtgatggtattcagagatggggcctttgagaggtgatttaagaatggagccctcctgtatggcattagcgctcccacaaaaaagctcccagagagctgccatgccccatccaccatttagaggacacagctagaaggtgccctctatgataatgcaggccctcaccagacaccagatctgctggtgccttgatattggacttcccagcctccagaactgaatgatacaaatttctattgttcataaacttccccatttctggcattttattatagcagtctgaacacactaagacagggcgcaccaaggactggcagtcagcatagtgcattaaacaaggagatctctctagaagggctcaaaagtccatacaataaatgagtataacttggtaaaggactaaataaacaaatgcatggatagcatcgagctggccatttactcattcatcaagcatttatcctcagtgttcacaacatcataaaggacagacatacattatttttgtctgcccaaccaactccccattttggtaccagcacatcaaccttcctgttgtttaataaagagacattcagtggctcacacctgtaattccagcattttgggaggctgaggtgggtggatcacttgaggtcaggagttcgagaccagcctggccaacatggtgaaacaccatctctactaataatacaaaaattagccaggcatggtggggcatgcctgtaatcccagctactcgggaggctgaggcaggagaatcgcttgaacctgggaggcggaggttgcagtgagccaagatcatgccattacactccagcctgggcgacgagagtgaaactctatcagaaataaagaaagaaagacagaaagacaagaaagataagaaagacagcaaagaaagaaaaagaaaaagaaaggagaggagaggggaggggggaggggagggcagaagggaggggaggggaggggagaggagagaggaggagagaggaggagagaggaggagagaggaggagagaggaggagagcagaggagacgcttggcccatgcctggccagtaacagccctgacaactctggccccagtagctggttcaggattaggcacacgacccaggtgggaacaaccagagccaagaatcatctgtagaactaatatttgctaggcatataggaaacaagcctgtagctaagagacacacagagaaagcctgcttgagaatgaagtcatgtgaaaacaggctaagacatggcaagaaacaggtctttaatggcatgacttgcccctaggtccagccgtgcctgaagctagcactacttttggacgttttagcaacataagccaataaattttcttttacactgtccttatgctggatgagtttctgtcacttgcaaacaaatgccctaatacagcaccattgttgaattcttttaaaaccctttataggaataattcttcagccagagtgcccaccctcaattataataaaaagtttttaaatatttttgaaatgtaacattctgagacatgaatatgaaataaggttgtcccttattattccctgcatcttcagaactttttgatgactgaattatttccgcttacaaaggaaaataagcttcttggcataactgatttttcacacccgatcctaataccaggttgattgggcctttagagcactaaaaacctgtctgctcagttctatttttgtggatgtcaggagctcacaggataaagtgaaatctgaggggtttgctgcttgaattcacttctttcttgaattcatcctcccccatggaaaggaacagaaaccaaagaagggggtgttggagtctaaaagccactcttctgccaacttccccagaacacagaggccagtcatgtggtcaaaccacagctgcaaaatgctgatgtcagcagtgccactctgtgggtctgtaattggttcaccatgacaaaacaccattccaaccaggcaacacagactcaccatggcagcctccaccaagaatccggccaacccactttcccttttttgctgacatctgcccagggcagacagtagcacatctggctgagtgcgcatctgactgcctatgcacaaggaccctgggtgagatgggagtacactgaaccagactctgagtggtggaatctgccagcatagcatggagtggtaaaaaaggggcaggactacaagttcagaggacctgggcctagcctgggatttgctaccaaagaggcgtaaccttagataaaccatttcaccttttgaggtgtctattttcttatctttaacatgtgaggagtggaaacagattagtgtttttcaccgtgggtagtaaaccatgtagtgggtgatgaaatcaatttagtggatcaagaccaatatcacccatgcaaaaaaatgattctagaggagggacaaggactatacaagattagcctgagtaccttgtagtgccgaaaagaaaggacatgctaaaaaaaaatccacaaggatggacttacatcaaagggatacaggagccaaccgaaagcactcctaatagctaaagctggacgaacttcagaaacaaaataaagtactactaaattataatccaaagtatataataaatatcaatggatccacactgattaaaaaaaactgattgaataaacaaatggagaagaagaaacaaatccgactcacagaagaatgtcaaataatttatgtagctacaccaccctcaaggaagtgcagtgtaactccccactccttaagtatgagctgtgcataataacttacttccaaagagtatagtatggaaaggcgaagaaaaaataaccatatggtagagaagcctgacaaacactacctcaaccagatgagcaaggtcaacataaccaaaactataaatcatgctgctaacatatactcttgatatgatgtaatgagaatggcattttacctctgtaatcttcttccccaaaacccataaccccagtccaatacaagaaaatcatcagacaaatcccagtggagacatactctacaaaatactttaccactactcctcaaagctctcgaggtcatcaaacacaaggaaagcctgagaaactattacagccaagaggaatctaaggagacatggcaaccaagataatgtagaaccccacatggagtcctggaacggcaaaaggacactaaggaaaagctaaggaaatctgaatgaagtatagattttagttattaatactgcaacagtactggtctattaattgtgacaaaagtatactaaggtaagatattgacaatgggaaaaccacttggggcatatgggaattttttgtactatcttcacatcttttctctacctctaaaactattctaaacttaaaagttgttttgtgttgggggctgtgattaaaataagtaaagttggacaaacattgagcaatacctaagcagatgatctctaagctttttactagctttaaaggcaatgttttgggaagtatttttaataggcatgttgtattaattaattattgtgcttttcttattatttgtaattgagactactgggccactaaagtgcatgagttcagaagtagttagggaagttatggaaaccattcattcatttattcaacaataagtatgtgctctgtattatgtcttcaaaaaatatttactgttaatgcatgagcgaaaggattctacatctccctaattttgttttgtctcaaaatcatttgaataaaatgtagtattttccaaggaaaaaagacaatgtagaaggagcaataaatctacagtaagaaaatctagatataagtatgagctcaactatttttgcccctagggtaagtcagtcatctgtcttcaatcttattttccttagtcgtccaacaaggttaataaatcccctgcctacctcacagggttattttgttgtgagaagaaacatatattaaagtgatttacaaatgtggaagtgttatataaaataagggggttatgacaatctaatgataaccagaattctctggttcttctcggaatcagaatggactccaggctggttaagacttggtcttctgcctgctgaaccaatgcttggatttgctaaggggtccatgaaccagagtcagtatctcctaataacttattagaattgtagaatctcaggtcccattaaatcagaaacccactaaatcagaaactgtgggggtggggcccagcaatctgttttattaaataattaatttgtttgtttttgtggagactgagtctcagtattctaaccaggctggttttgaactcctaacctcaagcaatcctcccacctcagcctcccaaagtgttgggattacaggcattagccactgcgacggactcaactcaagtgttttaccagtccctccaggacactctgacactgctgaggtttagaaccacttccctcaagggtgtgtcccattcatgtggccccacccctccagctggctccctgtccagccagaatgttgtcttgcccttgtttcctccaaacccccttcacatccattgacacctggctaagtctcacacaagtcatctgagagagaggagaaacagtactgttaaaaggatgtgggaggtccatgacttgctaaacctcagcctgagttaactagctacagcaagacccacagatctcgcttcctacaacatgggtattttccccagactgggaagttcttagccgcgaagagaaatccagcacctgcggagaccacacactgcacattttacaaaagaaaccaaactcccacatcctgtccttctgacccctagcatctgtcagacaaaggtgtcttatctgtgggtcagaaaaggcagtcatctaatataaagatctatctacacctagctacacacacccaggaaaataagacctctggatgccacaaacaagtggggcttccaggcccttaatcaaggaacaaatgatgcagaactcaaagtaacaaacaagctggaatgttattttgccccacgcgatcaaagactagaaaaacaggaattacaagtcagaagtatgatgcattggcaggtgtgcatgaagaaggccaggcagtcctttttctgagccatgtttaggccaaagtctttcctttttgacaccctattattggtatcattccttaatgacacacacacaaaacaaaattaaagaagacactggcccagagaaagactgagctgaaaacctaattagggtggagttttacactatgtttgtgtatatgtatgtttataaggtaaaagaactgctagtacaaacacaacgcctctctaaagaggctgggcttgttgtgcctcatgaggctgatcattatttcccaggcaaaattcatatataaatcacatacatacaaatttatgtcaacaaataatcatttttttatttaccgccactttgcttattccccattcacagtcttctggaaaatatatgaaaaacatcccctaagtgactaatacataagataagcaatacactgccacacaggcaaattcagcttaagagactgaatttgcatgagccatcacaatgcctgtttgcagacactctaaatctgtattcacaggtcatctacattatctcaaatttttatggtaatttttcctgtttcctatcatccctccttcccacagtgtacacacagaaatcttccaatcatacaacatttaatttttgtatttgactaccagttgaactgattaacacatattcccttgctcaaaacattctgtggctctccaatggccagaggatgaagtagccatgcaccacccttgggttcccatgaattcttaccctacagctgcaagggataacactgttttcacctttgctcatcactcccctctacctgaaatgtccttctctcccatttctctaccttttgaaattgtaccaggacacttcaaggtcctgctctattaacacccttcccatgagatctctcctggtttattctttgacattaccctccccaactcaacggttatcatggaaaaagtacccaccccagagaatgattgtgagaattaaatcaggtgatgttctttcaaaaagtacagagaatagtgtctcacttccagcaaatacttcattaagaaactaccattattattattttatggtcctccaatctttgtgactagttacccttcccctacctacctcttggcttaccttccccaaggtactacaggcttccccctttctctcctgggacctgccccaaaggttctataggtaaaggcccccttaactgtcacaattttaactaaactgctgactcccagaactgatcaacagctctgccctctctcttgcactgttgctggacatgtctgtgctgataccacccatacacttcaagctcagcatattcaaaaccaaaagcactctctttctctaagatctactcatcttcctattttccccagcagtagtcaatggcaccataaataacacagtcacatacgcctgaaactctgcagttactttttggtttgctttatatatttacttggagtaatacatttacttggaataatattcaaaaggtataatttcaacttcacacctatcctgccttccgttaccccttcctaggacagtctgatgttatagcaacctcttgtataatcttcaaaagatattttatatttttatatatacagtgagtacaattaaatgtttatcaaccagctctctggaaaaacaaaaacaaaaatgtcctcatgtgttatgtttcctgatttccatggtgtaaatactcccactgtggctggcttcaaactaccaacatgaagtaatcagccaagggcttgggaagtcacgcacagttggttcccacatgccggtgtaaactggcttcagcacaccagtttttttgttttttttgagtcggagtctccctctgtcacccagactggagtgcagtggcgtgatcttggctcactgcagccactgcctcccgggttccagcgattctcctgcctccacctcctgcgtagccgggattacaggcacacaccaccacgcccagctaatttttttatttttagtacagacagggtttcaccatgttggccaggctagtcttgaactcctgacctcaggtgattcgcccacctcggcctcccaaagtgctaggattacaggtgtgagccacggcgccagcctcagcccaccaattttatccatgtgtgcatatatgcatgaatatatgtccatgtgtatatgcatactttcatataaaatatatattatatatggatattctatacttcacttttttcttaacttcacaataaatctcacatatcattccatatcagaaaatgtagagctgcctcatttttaacggctctattatttttaattagtacttactgatgaaaattaagttacttgcaatctggtatttattcaaatactccaagaaacaattttgcatatatatcattttgtgaattttgcatatctgtaggataaagttcttaggactgttattgctgattcaaagagtgcatgcatttccaattttgacagatactgccaatggctcgctacagtttggaccgatttacatttccatccacgatgtatgaatacctgtttcttcaaaactttgccaacactgttaccacattttgtgatgtctgccaacccgataggtgaaaaatagcatctcaatgaagttttcatttgcattttctctttttatgagtgaagttaaagttttcatatgtttatgagtcatctgtatgccatttcgtgaactatgtgttcaaactctttgcctttacagtaactggcctttctcgtactgatttgttggagttctttatatattgataaaagtaggtctttgtgatatgcattgcaattattttcctaaatgtgttgattgccttttgacatagtttttaaaaattgaccccgcaaaaatgatatgtaatcaataaatcaatcttttattttatagcatctggattttgtgtcctatctagaaaggatttttcatcttattattaaaagtgtattgtatttttttgtatttctatttgttttaaagttttgatccatgtggaatttattttattttttgcctgattttaccaacaccatttattatcccttgtggaatcatctttgccttctccctcaaccctactcccaacccctagttcctaggggctatcattctaactttccagtattttgatattatttgtcttttttctcctctcactgtgaccatcccagttcaggtctcatcactttgtgcctatactcccagcctctgcccttctctgtcaccaccaaaacactttctgctaagatagctcttaccgtgtcacctccttgttcactgtttacagcatagtctttggagttactatgggatttaggacttataccacttgggccctaatctacctctccatttacttttcccattacacagtccttctcttcatcaaaccggatagtccaccaactcttaaaatgtcatgccttgtttcatcctagctaacctaccacttctgcctagaatgtccttcctacctttcccttcgtccctttctttttttttttttttttttttttgagacggtgtctcgctcttgtcgtctagggagtgcagtggcaccatcttggctgactgcaacctccacctccccggttcaagcgattcttctgcctcagcctccgagtagctgagattacaggtgcccaccatcatgcccagctaatttttgtatttttagtagagacttggtttcaccacgcggccaggctggtctcgaactcctgacctcaggtgatctgcctgcctcagtctctcaaagtgctgggattataggcgtgagccatcgcactcagccccttcatccctttctttatctcaatcccatgtgcccttcaagatgtgtctcaaacactcaacttctctgcaaaagcatctccctcactcctcctgagctcctatagcactttaatatcttgtttatataagtagagaaaagatggatcaatatatagagatatagatacagatagatagatataaaaaacacaattgtagagagaaggaggagtgctataaacatatatatcccgaactgaagtgaatattctttgaggtcggggctgtggctaattaacatttgcctgctccctacttctaggtagcaccttgtacataataaattgtttttaataaaacgaaaatgtctggggcttaaaacgttagtgtgcatcataatcacctgaagggttaaaaccagttttctggactccacccccagagtttccaattccatgggtttgggccccacccaagttctgctaacaagttcctagatgacactgatacatctcctggagtcacactttgaaaaccactgcttcagaccgttcctcaaacctcaaagtaaaagcctttagaaaaccggggcaaaatgtgtccaaaagtctcatggacaagaaaatcctctcaaactgggtgtcacctagttatgtatagatttcatcctgtctaccctgtccagctcaaagaggcagtggcccaaggccccagaggcaggtaccacaggaactacatccatcctctgatcctcggactgccagtccagtgctgttcagcacacagagggggtctctaatcaagggcttggcaatagaggccgaaagacctgactgtaccccagttctgccacttgctgtgtgcgtgatcataggaaaactacttcgccctctctaagcctggataaccagggttctttgggtggaagcaacagaaaacaatttggtaaatgaagccaaagaaaatgtattagaaaacaaatcagttcaaggaactaagaggaggctggagaggcaagcccgggcacagctccgtggaatggaaagctacaccacaacaaagctgtatgcacagatggtctggccatgacacatctcgcagcagactctccatgaccctcccacacccagagtccagagagaggcatgtgactgacctggctcacagggccacagctgaggggaatggggcccctccttctggtcccagcagactatatccaaaggcaagaagtgacttctcaaatggaaatcaggaagggtaaagggatgttggaaaaaccaaacagcaagtgactgctcgctagcctctgttttatcagtgataaactggaatgatagtaaccacttcctaagtgataagatctaacgaggtagcgtaagtaaagcacttagcctggcacatggagagcgcccaacagctactggctgccactgttatcactgttattcataattacctccaccttcaaaggaaggatggtttcccattccctaatagctccaacaagctccgaaggaaacctcagttaattctatatatgccaggaatttgcatgaagcagccctacacctgagaaaaacccaagtgggcttccctgtattcttttaggcttcacatacccctaacccactttgcctcagatgccagacaactaagctacactagaatctagccagcaagttattttaagctacatgcagggctatgctggaggacaggttgctagatatcattgcgtttctgctataaaggtgttaaaaactcaactttggattcaactcccattagcaaataaacaaacctgtgtgtcgcatcagagagagaaattcaaaacctcaaatcaaaagaggagttaaggcctcctcccactcagttctacatggcctccagcaatggcagaaagacacaaaagggcaggactctgctcatctcatcctcctttgaggattccccagccacattctcttttctcttccttcagcaacctgaatcacaacctacagaaaaatggaacctttctctccagggtcccaattaaaagccagactcattccctttgagccacatctccccactgtaattaatgaattctctgcaactctttaatgtctatatccccttctagtctgtaagctccttgaagggaggttccacatctgttcaattcatcgccacatcccctgcacccagcctggtgtctggcacatggcatgtgcttaataaatatttgtgaaacgtatgagcaaaaatcttagcgcatgctttaattctagggaggcatctacttcaaatttaataagagttgctgagattaaaaaatatatacatacataaatatacacacacatatatatacatatatgtagattaaaatatatatattagctttagcttctaaacatttcagatgactgtccaccacaaattacttggggagggagaaatatttgttttataagatgtaaactataattttaaagttcttgtaactattacaatatttgatatcaagacaggaaaccagtgtgggaatctttacaagtactacattttaatacatatttggagaaatgttacattgaggaaagtatctgacccacacaatactaaaaataaagattttagtattttaactgtagagggtaaacaaaatagcaaactttagttatagtaactgtcagagatcctctgccaatcccacactggattgctcattgcaatttgattctgctctgctttacatttaagctatttttttaactcagatctactctcacacaatctcagaaatcacagatgaaaattccactaagattgttcatccagcccacacccactcagagaactgggctgattacctcagatatttttttcataagtaaacacagacatatagacagcaacataattttcatctaaagaaacttttatgaaagaaatttgcttcttggctttaaacccacacaatattattattattccctaagaatcatattccactcatactcaaggggtcttggagcatctagaaacaaccatattctggctctcaaacaacagacttaggtagaggcagttataaaccaagtccagagaaaattcaatttcaggggtacaaacaatgtggctaagaacaaggaaattaccagtgagtcttctgtatttttccaagatgaaggaaatatatcaccaacttcaaaacaaaatcatttagattaataactaaagaagcaattcttcacactgctattccatttattattataaaagaatttttaaatgttcacatagcttaaataagcccaggaatgatattggaaggctacagcctgcctgcacaagcttctgcaaagaagcatctttgaaaaaaatcaatatttcccaatcctttcataccagaggaatcctttataaaaaatattatactccagactttaaaaaagatgactttgatatttctaaactttttatgatgaaaaatttcaaacatgtacaaaagtatagcactgcactgcccagctgaaatgtaataggagccatagatgtaattttaatttcttaagtagacaaagagtaaaagaaaacaagttagttttaattacacagtattacaatatattcaaaatattatcatttcaacacgtgatgtttaaaaattgaggtatttttacattatttttcatactaaatctttgaaactcagtgtatgtgttatcctacggcgcttctcagtaaggactagccacattttaaaggctgaatagccacatgcgaccaacggctgcctggcagacagcacagatagagaattcatcacccagtttcaacgatcgtcagctcacggacagccttgtttcctctgtactccctcctcacccccagattatttcaaagcaaatcctaaaaactgtagcattgcagccatgttcaaagttccttgactctttttaacagttcgtttgttcaaatcagtaggtaaaccatcaactatgaggacctctttttaacgacaacacattttgctgactgcaacataataggagttacacttttagtaaaatgctgcagtcatctgaatgtttattacgcatctatcttgtgccaggttctgttctagccccaagataaaacagcgaacagggcccaaaggaacttctggactacacattagggtcacattagaatcaaacttttttagaaatgccagtcccgtcagctagcaaatagataaataaaaccgtggtatatacatacaatggggtattactaggcaataaaaaggaatgaagtactgatacatgctacaacagaaattaaccttgaaaacaacatactaggtgaaagaagccagacacgaaaggccacatactatatgactccccttatatgaaatgtctagaataggcaaatccatacaggcataaagtaaattagtgggtggggattaggggaatggacgggcagtatggggaatgactggtaatgggtgcaaacttttttagagggtgataaatgttttaaaattatggtgatggttgcacaactctgaatatactaaaatccattaaattttgtacctttaaacggatgacttgtataatatgtgaattgtgtctcaatggtgagtggtgagctatgagtctagacagggaagcaggagccaattcagaaagggtctttcaaatctgctttaaaatgtgaaatattcattgatccataaaatattcacaaaaattccatttgaattccataacaattttagtacatttttagtaacagcattaccgtagatatgaaaaaatagtacataacataggcaaaatatttattctacagacaatgattactacatgtgtgaatttgagatctccttgcaatatctccttggtccaaagatgagagcaaccagaacaggtgcttttcatggacttaacaaggaattctgttacttcgacataaaatgatgatggcatattctattgcttcatcataaaatgatgatggcatattcgttgtttcatcataaaatgataaaatactgtggatcaaaacaaatcagaaaactagaaaacaaaatgtcacattccaattaacttttcacagaatactctaacaaaatttaagcaaatataattaatacttttttcaattgagcagttactatagataggacaccatgtttagtgatgtgaggaatagaaacctaaggaatacacactcaccctgccttcaaggcatttaaaatctagtaagggaggcaataagtttgaatacattactagcacaggaggcaacagggtgagaggaataggggaagataaaaggtaagaagtgctgaaggaaggaaggacatcagcaacagagtttgtgatcagaaactgaactgggaagtttctcatattttaaaaaaacaaatgatctgggaaattgggtttagagagattatgctgacaaaagcagtttatgagttcagctttgaaagacttaggttttcacacggagagaacagagagctttctaggcaacaggagtgcatggacaaaggcaaaacgctttgttgattaataaaactcagactaccagctcacaggggtggggaatgataggatgaggccaaagctgagcccagtctgctggatcgtgactttaggctaaggaatctatatgcaaataagtagagaaaataacttggggattgagtctgagatccaccatatgttagttgcaaagcagttgtgaacttaacttttcctagcctcatctggagactggagatataataacaatgcctgctttgatattgccctgaggattaaatgcaataatgcatgtacaggaacttctgacagcacccggcacatacaagttcagcacctattactactgttattaatgttattattcactatgtaagccacccaagaatttttaacaacataatgacagtgcttaaataatttacctgaccatggaaaaaacagagacagaggtaggaaaacccacctgtagacaatgttaggacagagtgcataagtccctaagaccctgaactaagatgctgcagggcctccaggaaaggaccaatgtgagagacactgagacaagagttagggtgagcctgaaggtgatctgaacagtagtaattggaaagtcaaaaaaaaaaaattccagaaggggccagaaagctgatgaatgtgtaaatttagacaggaaaggaatgtgcagagaaccataaacaactctcaattatgcatggaagactttttccacctaacagtttccatcttccctggtatcctacacctcaatctcttcctcaggcattctaggttgcagggttctccaaccctccctggagtactactgaaatagaattaacaaataggaaaatacagtactgccgagaagcacattataaataaaactgcattatccagactcttatgcagggggaaatgttacaccagcacccaaactggaatgaagtggaagaaagaaggaatcactaattccttccccatcctctgttttgccatgagccccttaggtggtacccatgccactcttccccaacttctcaccctcagtgtcagcgtaagagtagagagttgaaatgtagttgttttactgaaagcctactgcaggagcttttggaattagtagcagtttctaactctctactctgcattagagaacagaggaactagctggctttccagcgctttctttaagaggtataaagcattactgttcagggttcatttaccacaatgggtaaaacaaatcagatttctctttagatttagatgaaaggaggatttcctttccttctgtattaaaagtccccagtctatcaggcccacaaaccataaacccaagcacaaaaatcaatggcagtaagagtctcagggattctgaaaacagtacatctagacacttgatatcagcaccagaaagtttacagcccaatctcagatggttttaatatttgtatcactggattctatcatgagttaacatctaattagtggggcgagaattgaagtcagactattaaaaaatctagctcagcaatttactggtgaccttaggcaagttcctaaacctcgttttccaattcttcacctgaaaaatggagataacctcacaacaatgcccagcaagacggtgaaaattaagcttacgggcagggcgcggtggctcacgcctgtaatcccagcactttgggaggccgaggtgggcagatcacaaggtcaggagatcgagaccaccctggctaacacggtgaaaccccgtctctactaaaaatacaaaaaattagccggtcgtggtgacgggcgcctgtagtcccagccacccgggaggctgaggcaggagaatggcatgaacccgggaggcggagtttgcagtgagccgagatcgcgccactgtactccagcctgggcgacagcgtgagactacgtctcaaaaaaagaaaagaaaaaagaaaattacagcttactgcagcctgggagtatctggcttatgatgtaactattaacgattactgaaaatatatctcaataataaaacagtaaatcttttggctaagccatagcttttgatacaaataaagctaaatgcctattaactaatggtggaaaccacattttagtttattcgaagaggtcaagcacaatagagacaaaatgggctggaatcctagttctgccaggataaccttggcaacacaggttaacctgctggaccctcaatttcccatctggttaaaaatacctagctaacagacttctgtaagtttaatgcggtaatgtacaaaagttcctagtattgctatttgttaattttcccaacagtaaaaaaaggataaagatgaaaatcaaaatcagctatgaaatcctcattcctcatatttacagagaaggtttcatttattcattctataaatgtttactgcaaacctactgcgtgttcttgacacaggggatcaagtgatgaacaagacagacaaggtctctgcattcctggtacttacatcctaatgagggaaggcagataacccaataacccaaagagacaatttcagagagaaatttaagtgctatgagcaacagcaaacgggtgatgtggcttggctggaggggatggtcatttagcttggatgcataagaacctaggcctgcttgactgatctcctttagccaagtatagtcctttagccaaggacctcaccttgtatgatacttgcggggtacagtgcagatgatgagaagccaggccttcgctttcacccatctgtggaagtatctcttttgcagctgtagtttaaaatatttctaaatgccctcatcccaatactcaaactctgagggtcagagcaacacctagggggtctcaagcacctctgcgcagtacgcagacacatggaaaccgacaacttcacagtcccctcagctccaagagtcccgactgaggagactggtggcttgtgaggcggagaaggacaagcacaagtgtgcagaaggcagcaagcaagttgcgttgccgaaggaagggcggcgcgcccctgcttaagaagtatctggacgacctgcgacagtgcccatcagcgactccagaggccacaaacgctccccgggaagctgggcagcgctaagaggctgcctgggagtttctggcttatgatgacagtacttaaagaatttacctgaccacggaataaacagagacagaggtaggaaaacccaactgtagacaacgttcagacagagtgcataagtccctaagaccctgaactaagacgctgcagggcctccaggaaaggaccaatgtgagagacactgagacgagagttagggtgagcctgaaggtgatctgaacagtagtaattggaaactaacaaaaaaaaaaaattccagaaggggccagaaagctgatgaatatgtaaattcagacaagaaaggaatgtgccctgggcctccagcccagcaccggggagctgagcaagccggggttgggaaggcgggcgagcggagcgcctgccccgcgagcgttgtctcagtctctccggcgcgccccatcccgcggatgtggtaaagcttcgcgctcgccccaatttaccaggcttcctgagcctctagccccggcgtagcgcctccccgctgcccaggacagctccgcgcgccgcgtcctcccgcacctgcgccgcggcccctgcgctcggctcctcctggcggtcaatcctctgagccgtccctcgagggaaggtgtcctggggtgggtgagacccgggtcctccttccccgggagctgcagccggcacccaagctcccaggcttgggtctgccccagggccggagcctccccgggcgactcggacagaccccggtccggcagagaaccgcggcgccccgcaaacagcagcccttccgagcccgcgccgccgccaggccccccgacacccaggccccatttaggcgggcgccccgccactcacctgagcgctgtgcagccggagacgctccctagttccccggggccgggctccggggttagcgcacagaaccgggagaaggcaaccccggcttctccggtacccccgcaacgtgcagctgacagctcccgcaccggccgcaggagtcgggggcggggatggccacttgcagacagactgcggggccggagccgcgctgcgcaccggccgcgaagcgctcaagtcccctctcccgggccggctggcgggcgccaccagcacgcggccagttctgagtactttgcccagaacttctcggcgcgcgccgcccggcgattagcccgaggagccgcgcaagggcgggagcgcaggggaggggcctgagaggcccaggggcggggccccgagggggcgggagggcggcagagtgatgcacaatctcaccaatcagaagtcgcctttcgggaaggaggtggggcgatgtcctcggaagaagccagcggattccatgacgcggcgggggaactagggaccccggattccggatgggttgggagggcggagggaggcgagtcctgcggcgaggcactgggtggggctcccggtggcccagctcggtgcctgcgcgcggtaggcgttcggtaaatgttcctctagtggcttttccgggccagggaaggaggaaaaagtgagggcagcgcgggaggggcaggtttacggagaaggctccaggggacccttgcggtcgcacaggctaggagaactcgacctcccgagaaagtcagactgtggcagaggagtcgagaacagaggaaatacatagggaggcagcactctaggcacgagatgacaaaggacagcatcagtgtgagacccggggctcggagaccgtgaccctacctccagaggcagtcgtgcagattcgtgccggggtgattttgttctgtgcagtttatgtgcaagggggtaggaggtggggagagcaccgtcgttactattaaatctccctgaaagacggaaaagtccacccgacttgacttcccactagcccaatggccttctttgatcctaggacgaatgcaagcagctgatggtttggggtcagtttgcagactgcaaatgtgtcgagtgccgcaggtggcgggtgggaagggcatgagcatttagtgagcacctagtatatgccaggagcagttgcgagcttgcaactgtgagaaaggcgcaccaggctccagtactcacggggcttgcattttttgtggaaagacagacaataaagaagagaaaatacatatctatgcaaaaaataaaaggctgacagactgttagtactgagaggagggccaagtccactttcgaaagtggtttagcgcgtgatggggcgctcaccctgagggcctctaggcgagggtggcttttacccagattcctgagcctgggaaaggagctgccacacccagtctcgcacagagcgttccaggcgaagggaatagcaaatacagggtatttagcctccctgaagacccaactaaccgacctcaccgagctgggcaccgcgcgtggctcgctgggctcagcgcctgggacggagtaagggctccacagtgttaaatccccctgccaaccaccacctgcagcgctcgacgcattttcagtctccaaactgaccccaattcaaggtttctgagactctttccggagctattctgttcacatttcattcaccacgctcagatcttcgctttctggaaccatccccctcgcgaaatgtctgggactg

SEQ ID NO: 422 - DNA, 12985 bp, Homo sapiens
  source 1..12985: mol_type = genomic DNA
gtgaagcaatccgtaatttgtactgatctcttaaatgtgacttgagattacagtatccacgatttcaattttttttaaaaaaaagcactaacataaaacaagcgagaatatgatgaaatgcaaaaacaaggaaaagtatttttcattaactcatattttagaaatttggtggttgtgtgctgctgaattcttggatgagttctcaaatacagaaatgttccgttcttgtatgaaattcaaaatgagcatgttttctcttctttaatattttaatgtactaaaaatagtctttaggaaagtgtataactgaaatattctgtgaacccacccaccagtttacctctaattaaaattcctaaggtaacatgaacagatttactttatcattaaaaatcatagctttttgttctcatctctgaggagattccattgtgttctcttagttgagtaacgattacaacagctcctcaaattcacatgtagcccagctgtattgtattttagcaggagggtattttttagggtttacactctgaggcaaccaaatgagaagtcttcccgtgggaaaaggggtgccctctcaatgcctataatgaccattaaatttcaaaccacaagattgatttcggttagccttcccaaggaagcctgtgatatcgatttgcctccaagtttaaaacacaccgcaaaccttcccctcggccgaccgaagaaacggcatttttttcctactcctttggggcagtcccctgagcacgtgcctgaagtcgaggttagtacgcagccagcagggaccctgacaggaaaccagagcagccccggggttgggggagccctggtaggtgctggtcgtcccggacacgcctcttctggagaagcgcgtttgtcccttacttgggaggtcccgggtatctgaagcggatcccgggtctggggacatgaaggggcgccgtggccttagggaaggccccaaagaggcctaggccccggaggaggcaagagccgcggcctagcttccaccgcgtacctggggccagacacggctggggcggcgccggagagcagaactccaggctctgaaggccgagggtgcgaattgtggtcccctcccacccacggcctccccatcacgcgcacgcagcccgcgaggggcgccctccgcgccactgccccagggacaccgttcatctgaggaactctcgcgccctgcgtttcgtgccgacagcgacgctcggagtcccacctgggaaacctgggttggcccggaaacctcgggaggctcagagcttgcgtgaggcgctcgcggcgccccagcatgccgccccgtcgcggagacctcaccttgcagcccagaaaccgaacccaagcccactgcagggcgaagggcccacgcgttccaactggcgcgaatataaccattcccaagaccggcccctcccctccccccacgagacccctcccgccgttcaaggtcacaccaaaacccatcattctctatatcacatactgaaaatgattttattttatccatttacatttaacttgatataaacttgtccggaaaagtcaaataatatgctttatattagctcaaacatttattaagaaaaccgaattccataaataaacacagacattaagttaaaacatatcacaaattgaccagtatgtaacaagaatgctttatctacacaaaacatcctatttcacatatttgttcattcttagaaagcgcttctgttctctgggtttggatttgaccagcacatgcagaaagagctgattgtgtttctctgtacaaagttgcagggttgtagatgtccgagtgcccccatcggctgccagcaggtggccgaggggcacgagggacgacaggaccaccacaaaacaaccaagggcacagagcagcgagaagacagaaacagaaaaggaagcaaacaaaccccagtcctgaaggatccagaaaagagatgtggcttttgcttttacaaaagaaaattttgcttacacgtttattttattcttccttataaagacttatcaaaatgggtcagatcacctcttcctcgtcacatgactgctttagtctactccagccacccaatccactgtcacgttcctcctgagaagccttcccttctacactctcacacagttgtgcttaagaaaatgaaaataagataaaataaaaataaaagcgttatcttgcaagccaagagagggctgcacggatgtgactgggtggactgggcaagggtagcgtggtgggagaggaaagaaagacaggagcttggagagtacaaggataaatcaaatcatatcagttgggccctcagatgaggcggttggtagcaatgcttgtcctcctttaagacaaaaatccctaacattgtgctgtcccttgaacacgtccgtgtgtgacctaggtgcaccgtgtctgtgcgcgcgcgtgtgtagcgtctgagcgtgagcgagagtgcgagtgtgtgtgtttctgcccacaaaccagtccattggtgtctgatttcagatcctgagtcgactccctggtacgtaaaatggcgggaaggatactttttgccgggcgcgggaggagggtcgcgaagtgtggggaaagaggggaccggaggggaggcggcgggcgaggggggtcgtaggcgtcgcgtcgaaggtgtgggtgggaacgccgcccgtcagaaggccaggaggagggcgcgagcacggccagcgcaagcagggaggccagggtggcgggaagggtgggctgaggcgctggagaccgagccgagggcgcagctgggtgggaagggaagaggggcggccgggagacgggggaccgcgggcgatcgaaatcaggcggaggggaggcctcgcgggctggggcttggggtgagcccgagcgagtggaggagagaggcgaggacgaaacgagacggggcgaaggccggggcgggacggggcagggcgccggggtccgggtgcgcgccggaagggcctcggggcggcccccggggcggtgctgggggcggagcgggccggggcgcggctgcattaagtgaagctcatagagactgtgtgctctagcgccttgcggcggagggaggcgatgctggtgccccgccacacgtcgctgctgtccggggagctgcagagctggggcgaaccggagacgttgctggggccggggagggaggcgggcaccatgccggggaaggcgggctggtagaggtgcgactgcagccccgcgccgttggaacccgccaggctgttggacaggcccatggagttgggcggcggaccggccgccaggctgcactgggacagcgactgcgccatggcctgctgcctgcccagcgccggcggcagaggcagctgtgacacgccaggcatggcggccgccgcccagcgggtgtcgttggcgtggaaagagcacaggctgtcgcccatggcggcggcagcggcggcggcagccgacgggaactgaggcaggcctggcgtgggcagcagtgtgccgggcgcacggaacacgttggtcgtctttttgcgcttcttccacttggcgcgtcggttctggaaccagacctggagcgggcggggcgggagacagacagggagctattagccggcccggcggctggggagttggggcttgagccccagaaacccgcctcggatacagccgctctgccctgggaggaacaagtgccgtaggcccgacaagcccccatacccagccggagactgtggctccccaccaactcctggcaactggcgccccctgcacccaccaagcgcggagtcctgcgctcctaagagctcgtgccccgaagagtttacgcactgtgcaaacacaccaaatgtgtgcagtcttcaccacgcccctgcacattctgtgcactgcacagattcacaggtctgcagtcaggcatgtgtcaaagttcgacccacaggtgtacaaatgaagataaacgtgtacccatgtagcttaatagcatgccttataacactgatgtgctatagaattttcagaaacgctggaaatttggaaattgatgacaggctgtggatgacatagtttcaaaatcgaaagacaaaggaaaacccctaacgctacggttgacagagcggagaggttaatacagtgatctgcgtgggaaagtgaacgccactgagctacagtgttgtttgggtcaccaccatgacttccgattcctcccatattgcttcgtgctactgccacaactctccgtgcctcattcccaaaccactctatggacacctttgtctgggctgtacgagtggctggaacctgctgccccaagagccttcaaccctattctttttttttttttttttttttttttgagacggagtcttgctctgtagcccaggttggagtgcagtggcacgatctcggctcactgcaacctccgcttcccgggtcccggctgaagcaattctcctgcctcagcctcccgagtagctaggattacagaaacgcgccaccatgcccagataatttttgtacttttagtggagacggggtttcaccatgttggccaggctggtcttgaactcctgacctcgtgatccacccgcctcggcctcccaaagtgctaggattacagacgtgagccaccgcgccaagccaaagtctattcctttcaggaacttaccaagggtcccaagtaacaaggcctccagttccctcaagtcgcccccatttcatttataaactaaaagcaaattttcggaccaatatgaattaaaggaggtcacatttcactacgagatatatgaatcaaatttaattttgctcagacaaacccaaacgtcctttttcagggaaatgagtttgataaaatacactccaaatgaaaacagccttcctattttttttttttttaacagtggcccgggagttacagaccctgtcaggcaaatttgcctaggcatgtcaaaccctctatcacagaagaagagttctgcctgaaagatatcacataagctgccaatccaagataactcccatctccccctatttgaatgtgatctttttaaatgacaataataataataataatttgccagcaagcctgcctggaagacttgcagtttaaaatctggtcatctggcgtttactgtgcctaaatataaatgatgtaggacaagcccaggtactgagtttcctcttagaatttggccaacgcaatttgaccacgatatccgtggaaaaaaacgttgtgcatccgttaatctaacctatttagtgtttactctgcaagctaaagtatcaggggtatggacatacctgccctcggtctcggtgagccagcaatgttcagcggtgtgttcatgcccaggcaagcgtagacgcactctacgcttaccagtgtgaacggtgttgcagtctagaatactcccccagcttggggccggccctcgcctttctaccgtgcctgcgccgtcgcctaccactttcttcctgtggtttctaccccattttgcagattgctgcgtatcccagtgtcggcgatggataaacaggtctcgtctcttcccagttgcagcccgtgagctggtggcacaacggattaatgaggcaacagggctctagatggtgagtgggatcaatgagacccaattgagctgttagcggtcttaggcggagagcatctctcaggaggaaaggaaggcacagcgagaagacctaaggccgaaagtcgctgtgcagcacccacccaaggctggactcgggggaggtagacgggacggtgtctgtgactaaacggttcccacaccttacacgccgcaccgggattatgttttgaaaggtgtcttataaaatcaagaccggttcctaacaacctgcaagtgccagtgaatcccgaaatgtttgtttgaggagagggagtgtgagggaaggagcagaaaaaagaaagagggggaggattgcccagtagaatttcaatagaaaatgtgactaccagaatggtttctgaatctaggatctgctcaggcacaggcggaaaagaacagctgttaaagaactaaatattatagaaataatcggaaaatcgtgctcaattatgtttgagggttagtagtcaaatgatggctacaaatttttttatgtttcatggcttactgggattgggaaaaaaaatctgcgtggggtctgagcacctccgttccaagctacgatgcatatgttttttaaatgtgaatgtttccacttgaaaactagagcatgacggattaaaatgcaggcaaaacctaagggagatttttagaatgcacagatgacaactccaggaaatatattaaccccagccacgggccaactttgtactcagtttgaaatgcagctcttcttggaaaatgcttaatacaacagtgagaatctaatggaggttggaatctaaaaatccactttcatgatatctgctgttacagtaatatagacatactgtaaatgtattttaaaatatatagcccgtttaattccccagctataaatgactgagaaatagaaaaaagagggagagaaagagagaatattactttttccccccttgaagcaaatgctttatgaagatctcattggaatccagcaaatgattaatgtgaagattttggaggaaatctggggagctgtattaaagcctagatctcaggttcatttcgatcagccagccgtgaactctgggccgaattcattacagtttaatagtgctgggagaggaagaaaatgcaatttctcattccattagaaaactagaaaatactctcagtttgtccccctattaagatgtggcaggtgacagggccattctgggggacacggtcaatggaattacagcacactatttttgttcatataaaatattgaaaggcaagcctgactgtgcagaagttattttactgatttggtttttatgtaaataaaatattgaaagttaattaatccatgctagagactaatgattatgcttattatattgcatttgatcacataatttgcatgattctcacattgctgcttaataagccattccaggttataaataattctgaaattggtttctaataatggcatgctataaaaggaatggttttattacactggccagaaaagaggagctatatcagacatggaattggcctccatgtgagtagagatgctttaataaatacttaaaagtgtgatatataccaaataaagataaaaaataagtatattggataatttagtctagaatcaaaaagcatctttaaaaatatacaattgcaatgaattaaatgtttagataatttttaatcagcgcagtggcccacatactgaaaagaatgtgtggcagtctgttaactataaagaaaactatgaagtattgatcatataagaacataagccaattactatttaatttgaatttggtcaaggagcaatggtacagtgaattgtgaagtaaatacattttccataaattatttttgcattacattacataatgttaatcattttgaaaagttaattaagaaggttatgttgatctgattactttttaaactatggaacattatttttaaaaatattgaaattgccattctattaaattgtgtctatcagcaggctcaagctattatctttgcttgaacattatgctggaacaattagagtactttgtctctttcttcttgtgcattcttttgtgtactttttgaaaataactatttctgttacatagcttatattttatttcatttacaactttttctgttaaaagaataactgtcattaacctttggaagacctaataaagtttaatagacctcgttttcttttttcataaaatcagttgttcaattatattttatttgtgattctaagttctattttaatttaaactaattgccagtatatctaggttaagacacagcattttaccctttaaatacagaattaatagataatctttctcttaaaggacaaaaccccaaaatttatgaatttctaacctgcaaaattgaacctacaagcaagcactgtcatcagtgttgatggaagtattgaaattgtatatttatgtaaaggtttaaactcaacttcagatattttttaaaaggtgaaaaataaaaattttgaagagcattactaacacatgtttacagttacacaattagtactcttttggtgtgtcgttttaaaagaccatggtctaggcctttcactaggaaaaccacccagacttatattgtataaaaatgctaatcattatgttaatcaacattactttattaatttgaccattttaaatccccaataatattcatttgctattagagcagaagcatgcgctatcttttcagtttagactatctttaaaatgccgaatggagacagaaacattcaacgctgtgattacggacgttctcattgcttacttcttagatcaaatgtaaagtaactaagatcttaaagttaattttataaaagtaggtagcactggtttaacaaattgaccaggttgatgacacccaggatatcgtacagaaaataccaccgtccaagacggcaaaggaagatttttcagcaccctggatagctcaagagtgagtaccggcgcttggaatttcacctccaggcacctgtccataaaatatttgatatgtcttcattctttcttttaaaaaacaaaaaaaaaaaacaaacaaaaatctgggattcactaggcttatacttttattcaccaattttcagaataattataggtgtgattttctaggttatatataatttacagcttggagagtggttggaggagaataaggggtcagcaatgatttcctctactgcctgtcaacctttcccgttctgaatgccccttcttcagacatgatatccacaacagaaagccttcatttcccctcccccaccgtagcttccttagaggactccaaaacaaaacggggctcaccggctttgggaatctcgtcagctgcccccagcgcactggtagactacgaaagttcaaaccccttgcaaacatcaaagctaggaatatttcgcctgagtgcagagggagggtgatacttaaggtaataaagccacgccgtgaaacctgggtgtagcacttttttaaaaggcgctcattcgccttatttgctcttttctcttgttttctgtataattgttgcattcctccttttatccaaacgcttaacacaaactcattagggggtaatatttgtcaataatgcgagcaggagttgaggtgtgcgctcggctgggccgcccgggggggcgctgaggttgccttctcaggcggaggaggcgaaccctgtagcccgacaacgccgggcttcgattttgaggagcttcttccgggatgtcgctatactggccggagacgggccttgcgtgtccattgggggatggcgatggggaccagtttccgggtagagaaggagataactcgatacaggaacgcacaggcagcctgaaagcagcccaggatctcgacaggggaagggaagaccctgctccctttgcccaaatcctcccgccctgtccttgccttctgtcccagatcccaagcccctcgtacctgcactcgggactcggtcagcccgatacgcagtgccagctcctcacgcataaagatgtcggggtagtgagtcttggcgaagctcctctccaactcgttgagctgtgcgggggtgaagcgcgtccggtggcgcttctgcttctgttggccctgctgctggccggcttggctggggttcgggccgccctggggcccgggctgcttgtccgggtctttggcgctcaccgccagcgaggccggagtagagcccactgtggtgatgtcctccccgggcagcagagtggctccctccactgggtcagagttgggcgccaggtcccccggatggcccccggggtcggagccccccacgcccagcctacacttcaccgcctcccggtggcccagaagctcggcggcatctttcatacctgaggaggcaaggggatcgcggtcactactttcttggcgatgccaggaggggctgtcttccccgcgcagccttccttcaacccgtcctcggccccctccgcacccgcgcttgtcctaaggaagaaactcccagggtattcagctgggttccccagaatttggacagccgggttggaataatatctcccggccccttgccctcgccgcagccggctcccgtagtaaacagcacaagctttcgtctctcccacaataaaacactcccagtcccggcaataaaacatgcctctgaatcccttccataaaccgtaccccaggcgccccaggaaatcgagagcaaatctttggacacaggggtgcggggggcagaaagaaaattaaacaattcctcggttgctgcggcacctgcgcttcggcagcctgacgaactgtacctccggccctcagccgattccctcttactttcggaagatgaataagcctccaagctttcaccccccgaaatcaacccaaatcagctccgcctccccctcaaatcagagaaagtgtttggaaaatggagtcacatccatcaccgaagattcccaatccggaaacccagagctcagcaacccagatagcattaaggaaactcgagtgaactctatggacaaccgtgaatcaaactttagagatttcaacttttctttccagagaaataaaaggcgcattcctcacagccattggcaacgctgagtcccttgcagaagagggggggatgactgtgaggttgaatttggcttctctccttctcaaccagcacacttagcaaatccgccttgatggcagcagcttctcctttatgccagattttttacaaattacaccacacttagaaaaggaggagagaagaagatggtggggagagagaaacggggggagggaaggagaaagaaatcccaaatcaaaacaaacaggagagggaaaaaagagagagaaacacctcctaacaaattatcacggggtatatcgcctttcgaaaaaaaaaaaaaggcgggggaggggggaagagaaaaataagaaaaacaaaaagtaacaacattccccaactcctttcttggatctacatattccatagatttttttttaaaggcgatgttaaatcaaattaaactttaatgcagcacaattacttttaaagaaattagtccatttaggtcgcattaaggtaaaataaggaacaaattgacaatttcctgccccggcttctcctggctgcccgggcgagaggcgcgcactcacctagcctggcgtccaggaggtcggcatgagacagcatcgcgcaccgctccagggcgaaagctgttcccccccaaattttagcggctttaagttatttaaaatagatataagctataagctatacgatatagatatatatagatcacctaaatgaaagaaaattcggtttgtggttaaaaagggggcttcttgcattataatgtcctttagagagacggggaggtgcttaacagttgaatgaacccgtgagcagctcggcgaggggaccaatcaggagggcagcctgcaaatgtcagcgcccggagagtcccccactccgcccgcccgctcgcctgcgcccgcctgaaggaggcggcggcggcagccctggcagctccagcccggagcaggagctaaagcagcctcagccgcctcggcctcgccctgagcttctgggcccggctccctctagttcttccctgcgattttctccaggctcccctttccttccccttggccggcgctgcgcgcttcgaaggcgtagctctgtgcctctgagctaacatcttcctagggcaggggcagagcaggggtcagagcgggccatgaccctggcgtgacctgagggtcgcccccacctgcgctctctgggcctgccgctcatattggcccgccagcccagggcgcgacgagggcacaccgcggccttcagacaacgcctggacttcgccgcggctcagtaggcctgcgcctagggtccaggcgccctggctgtgccctggggtctatacgagccccaaccccacagtgggcctagagcgcaaagaggagtcggcttccctggcaccgccagcgcccgctgtctgctttggggaccctcgcggagtgtgggttcgagcgctctgcactcttctcaccgggcttcttcccggctcctgctcttccgcttggcccacgcccgcatcctcgcccctaactcgctcttttggtcaaagtttctaagttcagctcggctcccaactccacttaaggctgtaaataaagttaaatgctctttattttcctcttgaatatgttaaactacttgaacaatttaaagtgctttgcacaagtgaagcgaaccatttctaatgttctgatttttcagagccagccaacaacaaagtttagattagtaatatatttctaaccagagtaattttcaagatcattaggcatttatgtaattagtgccaaatctataagcttttattacgattattagagtaaaatcagtataaatttgtactaatttactactgtttagacttggctgtcaagcctagaggttcttattgtaaatgataactgaggaaattaagtgcaaaattctgtaccatttctgatctgctcctaaacaatccgtttcaattgtatttgtagcagaacataatgcccttttaaagttatttgacttgtatttttatttgcaacacaagaaaaatgccctctacccagtcacaatgaaaactgatatttactactcccaacttgattaacattgatttttaattcgagagtgatgcaattaagattattcatttagtgcaaataaaccttccacaaaagggtggcccaatgaagtctgttttaaataatactgagcaaatggctttttttgttcgccgtccaattgacttagacaaaacattgaaaatgctggctga

SEQ ID NO: 423 - DNA, 10774 bp, Homo sapiens
  source 1..10774: mol_type = genomic DNA
gagggaggaatgagttaaggtggaggaatggggcaaggtcacgcgccccggcactggagggccaaccccggcacacagcggactggccgggactagggcagcgccgggctatggacgcggacgccggcgaagcgcaccccgggacgtccgcatattctttcccccaaaactagtgcgctccagccggcgcctttcctcggaacctaaggaaggggtatatttcgttgctttctttaaacctcagcacgatcacagtggctccgagccgcgggcggctgaccgcgggcctcgcgggctactcctggtaggggcctgcgcgagcctaaggtgtgtccccgcctgggttagcgctgcgctctgcactgtttcttttcctcttaaagcttctttctcactcactctctccctccttctctctctcattttttccccatttctctcgttcttttattcagctttctctctttctctcccttttgtgaatgggccgcggtgtctttgttctgtagagaagcgcccgtgtcgctgacttttgtgaaccagagaaggatcttgtaaaacctccttttctccttcgtacgcccccactcccacccctcctcccctgcctctttgattagatgttccctcatcgtcaaaaaaaaaatgtaatttcgttggtctggcggccactttctttgaacattagctcgctttcagctccaacttcaattagaaggagttgattttgagagatcaacaaaagaaccgaccaaagccttattaaaggtcctaagaagatctcccgggtcctttgagaagcagttaaggaaacagtgtgccctccatcatattctgttaccgtattttattcggactccaaaggaaagtgtcgcttgggggagggggaagcactttgatgagcggcggccgcggccccttttcactcagcgggctcccccttcgttctcctcctcctcacccagcgcccggtccgctctcggcgcccgaccccgcagcccgggcagcgcgagtgctccccactgcgatgcgcctggaggctccttgacttgccctcacacttaatcctgtgcaaactttttaccccgcctgtcggggtgggggagtgggggagattagaaacaaggggtagaaattcctcgaaagggaataaagtgcctaattttcaggaggaggtgccatttaaaagattcgcctagcttagagttggaacgaaaactcttttttgcacttttaaaagtccacccaggtagacgtgtttgggaagttttttcgggtgggaaatgggcttcgcccgtacgaacaatccggggaaatcgcctcaaggaggatccttacgcagcatgtggaaaaaagttgagggcaggggtctgtggccacattttccatcaaaaagtccctgttagaggcagtctaagaaagagagagaaagagcgaaaaagaaactttcctatcaaaatgtttcaattaagaagtagggtgtacgtgtgaggggaagaggacgctgggctccaacgtttcagtagaagcgcttaagacttgcaaacacccttggtggggacctggaaccccgggagatgccgacgagcaagcaggtaagtggcggcgccctcccagtgggtgctcttcccaggcgcgagagtccggaggggccgaggagagatctgcacgcccggagctgctcccgcgctctgcaaagtagcctgcgccggcacgagcagcccgcggcgtcggtctcaggtggcggcgccggggaagaaaacgctggggcccgcggcgccgggagaggggccgaggcccgggctcctccagcccgccgcccccgggtcctggcgcccacacccgagcggctgagccctgtagcgcgcgggagagcgaaggaaccggttctccagcacctcgcctcctccctgccactccctccggagcgccgagagcgcgagaagggcgggggcgcccagggcaggcctggagacccacggccccctccgcggccaggactcgggctctccgctcgccttcctcgcctagctctgcgccgcttttgccagccgagtcccggagttagcgcgcgaccggggcggggcgggagggcggggagggcggggtgtggggggcgggggagggcgggggcgcgcggaggtaacccccggctcgcgcagccattgcccggctccctgtcactcagcccgcgcggggcccccgattggcggcctagccccgttacgcactcgcctcgcgttcacatacccggggagggcagtagaaaggtgatcaatcttcatcaggctacatttccaatcacctaaacaaccgagcaagacaagccactccgacaaggtaaatcgcttgatttatttagtttgcaaagtgactctgcaggacttcccagtccccactgcctccacgttgcaccgggagtgccgcggcaacgccgagccacctcccaactctgcccctcgaattcccccccttgcggcccctcggcgcgatcccaggcgaggcaatgtcctgagaacgtgtggggcttagcaaacaaagtgtctgtgcaataaagtgaaacccagaaggacacgcacaaagccattgaaaaaaaagatagaggtgggaagaaggaagttgggaaaagaaagaaacctgggggtcctagaccagccgccagggtaattccagtgctgctctgttttgcaggttggctgcccggcgggtctctgtgagagatccaggtagatggtgaacggccccggcagctgagggcaggtaaggagaaagccgcggggccaccccggactccgggagcgcgttggttacccttatctccccctcctcaaatggatcccggcttccccggtccccagcaggtggtcggggctgtgggagcggcctggctcccctcttggtgagccgaggaccccggggcgctgtcgcggcccgcagccccctcccccgcctcctccgaagtaaccaagctgaagtgctaagtttggagaaagtctttgaaaactcacgctgcagcttcgcaaagccgtcgcagctttgagtcccattttccttcggccctagagccctggctgcttcccttccggtccccttcctacaagctggactccctcagcccaggtcttgggtcccagaagacgggggcgggaacggggctggggggagcttctttagctctaacttctctccttgaacgtcctagcccgagtccctggcttgcttcacagcgatcccgctaagcggggtgtagcgatggccccccagggccccaggcccagtttccagcgcccctccctgacccctgagagtggcaccccgggttcccggcagcggcgggggcgaggcttcgacctcccagctcgggtctgcgtgggctacgccgctgaggcctagttctctgttctcgaccgtgtcctggggccgcgggttcagctacaaggatggcagcacgcgacttgctgccctccggcttcacaaatccccgagaccctttgaggtgctaggccagtcacccttcaccccctgctgggaccctgcggtccgcagcccagactgggcagagagaaggccgggtgcgcgctggcaacgaaggacgctggccgcagctgaggcgctcccgacctcaggccgcatcttggggtcgcccccctctacagtggccccttcggcgtcctctggccctctgcgaagcctgggcccgttactgcggttgaggtgcggtgggatttcgcgtcagcgatctttcagtggctgggcacagagaggtcagctggagtggtgattgcgggatctggggcaggggcgcagccctggagacctttaaaggaaccaagtgtctaagtggacaagaagtgcaattagccctccacattggccctttgtagtctctaccttttcaaaaacacgtgaaacaaaatgaaacaacgcctcatgctctgggcggcctgccgtccgggcaccaagtgaacctttgcttgtgcaacatgaagctggcttctgccggattcagaattttgcctggacttgggagcttgtacactccgcggttctggctctgacctccccagcctggccctgcttttaacttctccttactcctatggactccctaccagtgtctttggctcattccaaccctagagccagacgacccagaaaactttacttttcaaagtaactgtggtttctgggctaaggccttgtggatcccagttgaccaccctgcgcagttctgtaacctgccttccctgtctatcccggggcaagacttggcagccaagtggctccgattgacggtttccgtgtgtctcgtgtcttcataggccaggcccccagacgcatcagaccctgaaggactgcgtggtgggagccctgcaccgctcctggccccgggccccctggatccgtcggggcgcctccacccagctgttagcatgatgtcttacctcaaacaacccccatacggcatgaacgggctgggcctggccgggcccgccatggacctcctgcacccatccgtgggctatccgggtgagcaccagccctcccgaccctgcctcagcctctcaaatgttggggacccccagactgttggatttgagtgcaagctttgttgctgagcaggcccagggagccggctgcaacacagggcccactgtctgtttacaatacagggcccactgccggcgcatggggcagagtcgtgggcgtgtgaggtggccagggctgagaaaacgcgcaatatgcgccttcccggccggatcaccggcaacctttctccggttgtggtcccaccgccagcgcagagctcatttacttgcggattcgctacccaggggcggctagtatttttcctttttccccaacatggaatgtgtaatctggacactcgttaggccctgacagaaagagccaaactttccttatgcgaagcggcaggctgcactgaaggagtattcttcctccctaattaaattgtcctctaaatcgatgtcctgcacccatttttgcgctgctgtagaggacgacttgagccaaagccggggtttcttttttagctcccgctcctttacctcatttattttctccgaaagtgtttttcaggtcgtgtttctgcctacctcttccccactccctgtcccccatccagagtgtgtgtgtgcgtgtgtgtgcgtgtgcgtgtgtgtgtgcaggggagaggggatgtagaagaagggagattgtagacttctcttaacttttttaacctctgagaggcatagagaggggcagccctcgaatcttggagacactggcttctagtcgcacatctgcactttctcccacctgtggcctctcaggctcggccgcccgagggagtttcttttattcccagttcggctttcttttgcgaaggccgagatctgggcctgccaggggcctgcccgagtcctctatcgcgggtccacgtggccaccaatgacccgcggcgcccccgcgtgtccccgcagccactccgcggaagcagcggcgggagcgcaccaccttcacgcgttcacagctggacgtgctcgaggcgctcttcgccaagactcgctaccctgacatcttcatgcgggaggaggtggcgctcaagatcaacctgccggagtctagagtccaggtgcgcactccccgggctccagggtctgggtaggggagctgaggctgctcggggaaggtctaggaaggctcttgagtagttcttgaggagaccatcctgtgggggtgggcttacagactgggcagccgctctcggactccccctagcgctgggccccagccaggaaagggggcaaaagttaaaggaaatggcttagagccctggattccgcctttagccctagggcgccttcggtgtcggtatcgaaagtactttttagaattgccggaggactagggaagctcccgaatgtaaagcgccctgcgggcctgacacttgcccctgcttcttcgcctgccccaggacttggcagtttcccttagaggcctgaattctgcctctgcccttgtcttccaccccgggaatcctagaaatggaagagcggagattggctggagcctggtgctctgcctgggtctcattagacgcttcctctgcttacagaggatgctaagtgcaaaatcctgctgccggctttcttatttctgtttttgagatgaaagggttccgatgataacgttcggattctaactcagaactctcctcaagagtctcgcctcctttactcgaaagcttgagaagggggaccaggaatgcagtgccatgtgctggggctctcctagaagagtaaccattccatttggttccccacctggagccaaagggccaacgaaatcccacccaggcttccttcccgagtccctcaagtactacctctgtttagcctctggccttgctcctacccccacccaaatactcgccctgcccagttctggcctccaggagctgctcagtgaaacggctcaggccctagacttggtgactgttccacactcttcggctctgtacctctccactgttgcctgagctctgttagtagaaaactgggcctccaaacacacacggggcctccaaacatacacggaagcagccaacagcagcaatttagagatggcagaacttctgactgggcagactgaaatattccgccctagggcagagttgcggtaggggtggggaggtgcgcatccctgctctggagccagctgaggaggggctttgagcagaaggatgggggagggtggaggagctgggaaccgaggtagggggcagggtctggccaggccagagacaggaaggggcggaggcctcggtgagaaaggattgcgatattctggaccgggagttgggtccgcggggcggtggagcaacaagctcccctagctccctttgacccactctcccccatccggcccactgcaggtctggttcaagaaccgccgcgccaaatgccgccagcagcagcagagcgggagcggaaccaagagccgcccagccaagaagaagtcctctccagtgcgggagagctcgggctccgaaagcagtggccaattcacgccgccagctgtgtccagctctgcctcgtcctctagctcggcgtccagctcttccgccaacccagcggctgcagcggctgcgggactaggtgggaacccggtggcggccgcgtcgtcgctgagtacaccagctgcctcatctatctggagcccggcctccatctcgccaggctcagcgcccgcgtccgtgtcggtgccggagccattggccgcgcctagcaacacctcgtgtatgcagcgctccgtagctgcaggcgccgccaccgcagcagcctcttatcccatgtcctacggccagggcggcagctacggccaaggctaccctacgccctcctcttcctactttggcggcgtggactgcagctcatacctagcgcccatgcactcacatcaccacccgcaccagctcagccccatggcaccctcctccatggcgggccaccatcatcaccacccacatgcgcaccacccgttgagccagtcctcaggccaccaccaccaccatcaccaccaccaccaccaaggctacggtggctctgggcttgccttcaactctgccgactgcttggattacaaggagcctggcgccgctgctgcttcctccgcctggaaactcaacttcaactcccccgactgtctggactataaggaccaagcctcatggcggttccaggtcttgtgagcccaggaatgaaagaggagaagaaacgcaactacctgcgccctccgtggtcccgatcctgttgctgctgctgcaccgcccgcctttgcctcgtcttctccaaaactgaattttcaccccccaaaaagatgtccattgcctgcactgccgcccccatttttgtgccacttgcttggggggatgtgcaaacccaccctgccccttggatggggggaccggtgcttcggcttggcctacacattctatacaggagagatgtattatttccccccttcagcccctactaaactcttaagcctccccttccagtctttctggacagctattaagcacttgcagccttcggaggctctgcgctctgatccgctgtttgagcccaacactttaatttattctttctggacactggagtcactaactggcgtgtttctgcccattggagcacccgcacactactccaaatcaaaaccactaagagttcctcccgcgcagactgctgccccttcagctgccctcgattttgctccacgcctgccggccagagcctcccggcgtttcttccgccccagcggagtgcgctggggcgcgccagggctaggcccgccggaggagcgcgtccccagccttccgcgcacagagccgcatcccgccccgccctgcgctggactggttcaagcttccgcctcggcgggaacgctgtacatagtcaggtccgttccagggaccacttaaactttttagttgctgttggttggttgaactgaacatatcttgtcttagcacccaggaaacagaactttaagatatatacagcacatatatatatatatacatatatatatacacatatataaaaaacaaaagcaaaaaatattttccctctgtccgtcccccttctgctcttcctcaatcaatggcgctttttctttttcagttgttgcaaagctgccctgccctcttcacatcttctccctctgtgtatttattgaagagaaccgcttggtttcaggaagctgggcgcgggatatccgaagtgtggaggaaacagacaagtcagggtacagaggtgggggttgggcaggggcgcagggctgaccccctcacccggtctaagcacagggtcgcagttccagtttacaaacctaaaacaagaaaaccaaaaccagggaacaaaacaacaaaacaaaacaaaatccgtaaaagtacagcattagggaaaaacaaacaaacccaggccccaaacccagttccaactcctctgtcggcttctctctttcaacacccttgttttgtctagtgagtttttagtgcaccttcgttctccgaaatctgcggagagcccgcgcgcctgtgtatcaattttggctttggccgcttcgtccagtaggtgggaaagtaatttgtaaatttgatttgtctgatgtgaagatcacaaattacttgttgaaatgtaaggcagtccccctcctcctctttatctacattacttcccgaaaataaatgcaaattaatgaacggcttgtcagtgttgctcttctgattccagcccgaggtcctggtctcggggggctaaaagcgagggaaactccgtgttaataacccgcgtgttaatgacctgcgtgaagctggaggccaaaggatgaggcgggaggacttggcaagagaagtccccagaaactttcgcttagggagtgtctccccccacccccaccacgcccctccgcgtcagcctggcctcttcccccaggcgttttgaccccgcatcccccctcgccatccaggacagagacaggtgtcaggactcaattcccgaagcaattcctttctcttcagaggcaggagcctggcactgatttcttcaccctaattgcctgcaccagaaagaagagggggaggggaagagggtcgggaggcgggaaaggatagctctgtaatgctctcagagctgagccaaaaaggaaaagaaagcaaaacgacaaaaaactgatccgtgtcctgcatgttggcagcagacaaccttccttgctgctgagctgtcccgggtggcttcaccgcggctggggaatccgagccattccttccacgtgctaagatgtccctctaagccctcagctcctgccagaagtagccaaattacctttcttcgtactgtaaacttcctttaaaacatacaaactcataacctggaaaagtcgacaaggacgcctttcactttggcaggggaagaagacgactggcttgcatctgggggtcaggaaggacagttccatctccctctgagggaagacggggttgaggggtaatcctcccccagaaaatgcagagcctggaactgtccagactctggcctgaaacctcctgggtgtaaggccatgaatctgctcgacttgctcacgggcgggaaggaaacaaggaaacaacgaaaagtttcctgcgaagtgaccaacatcccctattttttaaaaattccgtgtgagacctgagaacacactgtgaagcggggttcggagaacgacccctcccgcgttccgcgcccagcggggtcgcagggctgcgagcccggctgtagcaaagctttctcggccgcgtcctccctccggattcggtaggccaggctcgggcgcgcccttcccacaccaacaaaccatctttcccgactcagcagaggcccacaggggcgcagccgctgtccctccgcccttggcccagcggcgccgccctggtacgccaggcctgaaggcagggccggcccgcgccacgcagggtctcccttaggcggcgccttagggtgaaatgcggggccaagcctgacctgccggggtgccccgtggcatctctggtgcggaccccgcacgtgccggggagaactggcaggcggccagggcgaggaggcttccagcttgcgccgcactggcctgggcacccgggctgcagggccttttgggccctcccctcagtgaccctgcctgtagcggccccagggccgctttggctcaggcagcagctgccaatgcc

SEQ ID NO: 424 - DNA, 121826 bp, Homo sapiens
  source 1..121826: mol_type = genomic DNA
gacgcaaactctccaaccaatggcagggagagaatgattgacacatctaagccagagggaaaataataaaaacacacaacagggggaggaaaacaggccgctgctgcacggggggacgagcaggcaacaaatccaggcctccgacattaccagaatgttctttaaagacactgggctttgcttaaaatatacattatgggccggagcatgtgaactaattgtataattaaaatgatggacagggagttcttctcttaccctcttttcccctgcttcctttactccgaaatttcctttcctctcttttttttttttttttttttgttgttgttgtttttagggaagggaagaaaggaaacccatgcaatgtaagatggaagataaaaatatttaagtaaatgctggagaatggcgggttagggagtgactgggttatcacattcaaccccagcaataagtgtgtggatgacaggcagaaagcaagtcagactgaaactcaaaaacaccactatgccgtctcagacagggccagagcacgctgacggccagaaagggtaaaggagggaggcctgggagtgcgatgtgggcatgtagggaaaacagagagagaaagatacacaagtccaagaacaaactattttctaaaactcagtgtcttctctattccctacgcccttataaatatccttacacatataaataaatgatccccgagtgagagaccccggcttctggtaggttcctggggttttttggaattgagaagcccacgacagactgcagggaacacgaaccccggaatctaatctcagggcccatttaggagaagtagctgggaccacatcgggcctcgaggatgcgagtgtgaggtcgacaagatatcgtggaagagagcgaacgagggaggcccccgttggaaacagtttctgtgttagaacaaacgccaccaaacgaccgacactgcgaggcctggagctacctgggctggcgccgcccgagccccgggctgcgagcccagaggctgggaagtgatgggacctgggggcccgagccggagagtgcgacccccagcccaacttttttgcctggcatagaaagcagggaccggacaggtttcaaacggatccgagtccctagaaaagcaaaaacagactgggcggagtgtggggtggggggtggctagtggaactggtgagtgtgtgtgaataagctgggtgggggtgggagcagaagacagctcttgcttcacaacacccagtgcaggaaaagaaaaataaaatctcttcctaaataccccaccccccgccacccacccaccaccaactaccatcaccaccacggccagtgggcccaaagaaacagctcgctgcctttaatttggggacctatgttaatgaagttggtaattaattcgtcgctttgttgtcggttcttatactgtatgtgtactcaaatgtggccgtccttgggatttacagcaattaacgaattacgggagtgcgcacgaggcagcaagctctcggcagccgggctccggctcgggctcggcctggggctggggactccgcggcagcggcccctgtcacaggtgtccctagagctttgggccctggcggcccctcgagcccccgaggggcccggagcccgcccagctccttcccggccctctgcagcagctccagtccggagacccgctggctgtcgcgttcccaggagtcaagagtttctaggggcccgggcgggggggagggtgagtaccgaccttttttctcaccccacccccactgtactgaaacacctggcggccgcccccgaagcctttaatggggatggtggtgaggagggggtaacaaatgccccgggcgttatgaccctcgtggcgctggctgtcggaggcactggttgggtgcgcttggtcagagtcatgatgctttcgatgaaggaaaggcaaatccacctcgatcacctgaagcagagtctccttcctacccctagaaaagacaacgtttcccccagtttgatcacaatgatgtttaaagcataaaagagccgaaaaagaaaaatggacgttgtgaatctggcagaggggaaggccggaggaaggccttggggacagtgggcatggggtgggatggagaatgatcagaacatgcgcttgtgagctaaaccaagtaaaccattttggactgggagatccatctgccgtagggtccagtgtccagggtaacctttcaagcccgatgtagaggtttgcgatgtcctcccagatggcgggggcagctgaatctccctaaaaatccccctgttctattcgacaggggcagatttatgcatggtggggcgtgagagggttttgcccttccagcggccggcagcagacagctcccgcttctcctttgccctctagtctaataacttcgcagaaatacagggccaataaactacgagttggaaatggacagtgttaaataaacaagggtctctttaaaattctcatccacttcagatgtctaaagtaagattgtgatgattttgtcacggtttggtaaatttacccctttaagaggctttcataaatcccagaacacaccttcagccagatttgaatatagatttaggttttaaaacccagaagctggaaacaccgctttatcaaagagaatttccctttagcttagcaatgtgctgaagctcttaaaagattggatctgagagagagagacagagaggagaaagagaactagagacagagagaggcagacaaggaaggggggggggggtgaaagactttctttttctttctagaggaattctgcccagactctgcagcagttggtagcaggcaagctttctcctgggtgtcgccttgaaaagttgcaaaattgctcttcacctgtaagaacatgctctttatcttccagtctcttcttgtcaatttggaaattgcagactgcccggctcaggtacagtccccacaaaccctattctaggtcaggacaaaagccactggctttgggggaagggggctgggctcttttactgaaaaccttagatgcttggtgggagaaaaagactctttggatgaaaagtctaactcttgattttcagtaagttcttgaacttccaatttacctagtatctgttcattgtatttctgtgtttaactttttttctgtgtcctgtgtcgttaacattttttttctatgaatctgacttatggtagcatgctttgtgtttttaaataattttcattaaaaagtggatggtttttaattgccacttgtacaattattttgctacgcatatgagatataagcattcagaagctaaattaagaaagccaatacgaagggaatcaaattatttgtcagagcttgtgtgcagtttctagaatatgtctaatatgcatattttgaaatcaagattcatgtgtggcactaactaggctcaatttctccaccgcacaagccaggccagtttaaaatattccaaactttcctccaagtttattaactttggtggggggagtgggggagggggaggggagagaagacatcccgggattcttccaggctaattaaaaaagaagaacaaaacccatattccgtgagaacatagccttttgggggaaaggagccagttagacttccttaacactgaattcagaaatatgaacattaatttccaatcttttcagcaattcactggacagtgagggactacattttgccttagaagcaccataatacctagaaagaagtcattttttcattaggtttttagatatatctttattataaactttgaggagattaaccttaatttttttaacaaggatttaagactggaaatgcagacaaaatttaggggaaaaaataaggcaacagatcacttataaattaagcttgggtctctcactccctgcattgcggttgcctcaaaaaagagggtaagggagaaagaaacaacttcaaagataggattgggctgtctcgataaaagagtagggaggcaaactccaaatgcgaaaaagaggaaaagaggaccatgttgttccggaatgaaacggattaagattgtgtgacaagtgcgagatgtggtgctgtgagacatttatgagcggagtgtgagccgggagctgtgcctctgtccctgagagtgtggggaccaagggtgtgtgcagagcaaggttagggtgagggataggaagggcatgtgtggatgtgagacagagagaagtgtgaggcagagtgtgtgtgtgtgtgtgtgtgtgtgtgtgtgttagaagggtgtggacgggaatgtggatggattgatgaagggtggtagctgtcagtttacataattttcatctcctggtcctgaagtttccttgaaatcaattctactgcaggcagcagccttgagcttacagagctgatataaaacaaccattacagtccaatatcttgcctgtttgcaaacttcatttaaaactggggaaaaaaaagacccaggaatggttttgtaagaaaggaaaaaagaagaaaagaaaaccacagtgaagctttaaactagtttggataaatctctaatcttttatttgtaaccttttacaagctttatttcccgtatatgaaaagcttcttttatatgggcacgacagacttttcctttggatttttaattagagtccatcaattgtagccatatttaagaatcaatataaagtaatccttcgagatgggataaggttttaatcgaaaatctaatttcccactctttgcagatcattttaagaggctggttgataaaaaaaaaaaaaagagttcaatttttaaaagacataacacctaaaacctggaaaagatcatgtctacaagaaaccaactgatgttgccttacaaagaaaaagtctggctgttgttgggaacttttttttttttctacttggaagaatttgacttatttttctctcaaacaatattccctaatgtggctcctatgagagtattcacattgaatggagaaagaaaaagacagacattgtttgtctgaaacagtatttcatatgcaaaagatagcaaccttaattttttattaacaaagaaaacataaatcttgacagatccccttcactacatgctcccaaattctcaagattagagaataaataacacatactttttcttttttgtgcatgaatgcaaactttccattttcggattcaggaatgaatatttctgtccaattttaaaacttcaaaattagaattttgcaatttttaatttttttgcaacaatggaaaagttgcttatctcaaaggcatagaattttaaacagttctaccagggtcactggctttcagtttgtcttaaaagagaaaagaaaagaaaatgaaagcaaggaagaaaggaaataaacaaacaaaaaaatgaaaactaattgtaggtgcacagtccagaccgtttgtgctgctgaacgattaatctgagatatttgttcaaaggccgaacattatataaatgtgcatagtgcatttccaacattcaccgcttagtttaagatctgcaaatcatccgtaaactagaagggacccccccacaaaaaagtttataatgtattttcaggcagtcactgtacttttaaaaactgttgtatctgttaagctcatttggaaaaacgaactcatgatgtttgcttttaaaaatctgaatgaagcgtgtttcaacatatttgatagccatgcttttcttttatctacagaaatttcaatttatttaaaagcctggcgtttaatgcactacatgaccgcatgaattttagaggagccctcttgtatttctctgtaatcgtgtctaatgaaaacctgggattttccattattttttaaaaaagtgaaaatataatgcatcttcattaggaaaattgactgctgtgctcacgacagttcttaattgaaaaggcaacctattttaatggtgtggttgagaagaagattacatactttatccaaacacaaagacaattaataatgagaagcaggctgctgccattaactctaatgcagttgcatcaacgtcagtgaaaagtgctcatacctgagatacacggtgcaaacgcccccggctccctcctttcccaattcacccacttcttaatttgagtttcttaatgtgcaagcgccagggccggctgtggtcaggcgggctattttctggcaagtgtggcgcggggctggacgcccctgccggcgggtcgccgggtctcgagctgcgccgccccgctggaggcgccggggctgcctggctctccgcgcaaacctcgcgcccttccgtttgcgcgcatggagccgggtgagggcggccgcggccaccgcgcgatggaggatttggaagctcagagccagctggtacattttgagaaatttagcaaaccagactgggctgcctcggaaactgggttctgttctgactcatttgcagaaaagttatggggaaaaacatcttgtaaaattaaggttatgtttggcgggtacagtcttgagcgcacatggtcatccggcgaatcagccaagttttccaaagcgccccctctccagctctcaggccaggggagcaaagcgtaggtgtgtgcgtgtgcgtgtgcgcgcgcgcgtgtctctgtgtctgcgtgtgtgctcgcaagcgcgtgtgggtttggggtggggggacatcctgacctttctacaccctagtgcgtcccaactccagactgggaggagacgtctgcggcctctggtcttttcccttcttggacgaggtgcggccagctgagacctcacaccggccacctcggacccagtgcgccgagctaggggagacggcgcgggactgggggacccctgggatcccgccctcgtagcggaaggagtggcagcccttggtgccgggcctggtccttgaggctgccggccctccggggcgccaggactcgaggacgcggtttgcccccgcagtcctaagatccccggggccgtgacagcttggggaaggggcaaactctgtttggtctccacgaagtgcttcgatgttcgcaaaagggtaggcccctcttgcttggggtcctacacccctcggaactggctctgcccctgcctcttccccagcacagtctcccagctaaggctcagacagccggggaaaggggcgcccccatcactattccccacaacccgccccagtgtgagccagggcgcggctgcaggctgacaggcgcaccgtgaccacgccgtcacttcccttcaccaaaggttagatgggaggcgtgcaccctctggggagttcgcaaagcttctcgctttgatcagccgcgcgcagtgccagggagagatattgctggggtctgagtccgtcggaagtgtctagaaaagaagagagaggagcaggtaatcagactttggcggctgccctggagacactttcacacatccagcctcgtggaggaggaaggaccctgttctccaagggccaactgaatacactctcctcccttgaggcatagcctcacaggaaagctccttccacaaatgcacgcttccctttgcagccctcagtatgctggggccagctctgctgtccctcaatcaagcataccccactttcttccctgcttccatcgatttatctacaaatttcctgtagacttgccacttctgtgattttgcccacgggctaggtagcctcttcaaggctctgaagacaagcaggcctggagatttccacgaagccccaggtggctcctctccctcccttagggcaggtgagtctctagaacactgtaacctccctttggtgagagccaactatcagctacttggtgtggtctaggaatcttctagcctcctttccagcttcaatgttagataagcctccttgcatgatgtatccagagtttcacttgttccttttaaatacctttttcagatcgcaaacgttgaagtactcagttactatttatcaaccaagccctggtttctgcttttggtgaggccatgtgtgtcggctggaataaggagggcaccaggtctcctagggatagcttgaagtctagatgtcttacttgcccaacaacataagagcaaaaacagacttgcttccatttgtggatctgtttcttagcatttaacctatggatgcttggaggcatctttattagcaagtgtctgactttggatagccactcaataatgacattcctaatcatttattgaataccatttaagctagttcaaccacagacagtaactcttagtctaaatggcagttttctggcagcttattcaactactgaacatgcaaaaagtgaaagatatcattgcttccaatacttagctcccaaatatgacaatgaaagccatcacttaagggacacacagatcaccccaagtgtagatagtgtattctgggttactggaagagcagtaacccttttgattatgctctcttgtatttgatggacaaaatatgtcagataagcacagaagaaataggcatgggatagagaccttgagtatcaacagaatcatgggcttaagtctaccctgaccttttcctactgtttcaaccaaaaagcagaagtagtggttgaagtggttgaagtctttctctaacaaaaagacattctctacatgagatattcaccaaggaattggagggacaccaaacaatttcattatcatcaagaaatatttttattatcctggtagttggcattgggtagatataacttcagtcaactctagagtcttaatgaaaacatttcagtaaaagcaaacattttacattagaccatatattcttaatccaatcgcacatttgaatcaatttggtttattacccaatttgtgcacacatggtgggatggataaatttgtttatttttcatatgcaaaaatatttactgaagcctctgatttgtctaaagatttgtgattatcaagccaggacgtctctagagcataagtacttttttgaaagttttttgtaacatgaactcacattcattcattaattcatgtatgcattcaacaagcatatctgggcacctactatgtagtaggcaattgtcaggaattgattatgtctagaggttcgaatttttctcatttcaaataatccaatagttataataaacatttgatctaaaagttttcattgctctctttttgccgaaaattaagcctggagagatttgtccattgctctagggtgtaaggacttgtattgctcatccacagcagtgctcctagggaaaactgtaggagttgtttgcatgaattgacaaaagtatatgactcttaatgttcaaatctaattcgtttctaaaaaataaaatcacaaggcagctgagtgtatggtttattatgtgtttagattatgtgctcctcagtaaaaaatacttttttttggattaggaataaaaacaaactttagatttaactctgtattcttttagttcatctctaaaagatagagactatatgtgcatgtatgccatcattacattcttatcttatttcaaagagaatgcaaaaaaagtattcaaataattataaatacaatttatttttttaaaaccccctttctgggctagtagtagttactgttatttatttttgtccattttagcttcaactacttgccagtcctagaaattaatgggtttaatttcccctcgaatttaggacttttctagtaacaacttacactcaaatgtagtctttcttataaagattctccccctctctattttatttgctttccattcataacacagacattaccatgaaagttttcattggttatcgatggagttattgaatgtggtaatcaaacaacagattaaaactgagtctccatgaggtgaccagtgcatgaaggtttctttttttctgaagaaatctcacaggaagaattaaatgctacctcttacaaatcagtcctactgatctagtgtgtgtctggacacaccagagtctttgagacacatcctcaccaatagtactttaccttctgggtatgaattgtgggtcatggtgcctgtgcatagcctgtggtctgtagagaagccatattgattaatacttttcatgcaaattattcagaaggttgagggttttttttttaatccccaaacctctaaaaactcattctttatttttcaaatttggtctttttaatttccttcacagctaagaggatatgagagcccctttgttctggagctgctgattctggtattcaaggtgtttgtttgttccaaggactgcacttacgattttaaagtgccataaattcttcgtactaagctcctatggtctttataccaccttaccagtttagattatgtgatctgaagaatgaaaaaaaagtttttatgagactaggtagctattcgtattataaatatgaatttattaaatttaactggcaaaaagatctattatgagtaaagaaggtgaaaatacaagcttaaaatattcaggactgagaatagagcatttaatttctgattctctctgtaggtggggtgtgaaatagaatgctagtgttgctgatgccagaatgcttgcctatttttacacttccgtaagagatgtgggcaatggaaagggatacttatggaagtacaacagggtttacgtaaaagttcattaggcttcaggagggtagcatttgccttatggaagagagtgggtctcttgatgcccaaaatatatatgagaaagacagcgaagtgaaaaggagatgagaatccagacactccatcagcagccttactctgtgacagacccagaggcaactccaaagccacgagggcaactgcctgttcagtttgccaaagagccagatgctgttgcttggaagaatctcttccacagcttgatgtctgggtcctgtgattgccatccaaagaacagtggtggggcatgctgggatgaatgcaatcccggcatcccactacagtgttttcttttttaaaaagagtcattttaaattaaacaagttttaaaactcacatattattttcgaaaatgtaaaaaggaaattggaggataatagtacaaggcaaggctgtctatttgaaaaaaaatcctcttgaaacttaactttgcttatgggtcattttaaattatcccatgaggaatgggacatttagaagagacaaaagaccatccaccattcacagtgatgacataaaaatcactacaatacagaagaatggtgatacgaataatacttattatgttattcactatgatcatttacaatatttatttaaataaaataaaagtaagatattcgatactgtgttttgtaatagaattttgattgtgagtgccactgaacatgtgcctaaataaaaaaggcagtaagaaaaattattagtgacatttaaggggaaaaatcatgactgcctgagtgtctgatgagtcactgacatctcttcttaaatattatcagtattgtcacatgaagcaacatctctctttttcaaaatatgtgttaatatttgctgtgttgtagctaagtgaataatagctgctgtatgtctttgagtcactcagactacttcaacaaatgaatgtcatttgatcctagcatacagccaacacctttgctctttccgtgtaatcttttattttttttaattatgggattttttttccccttatattcccagactttgtctaatagcctaatggtaagtgcctgagcaccatagtaaatctataatttctttaatcattgtgatcaatgtgaatcatggcatgattaatgtggccggggtaataggtaatggttaaacagataatcaaaatatttggatagtgataactcactatacagcagtgtttctcaaccagcgacaattttgtccccccaggggacatttggcaatgtctggagacgtttttagtcatcacaactcttatctactgggtagagaccaggaatgctgctaaacatcctgcactacagaggacagcaccctacaacagaaaattggcccaaagtgttaatagttccaaggttgaaaaatcctggtgtagagaatggataacacgtataatgatattgacattttaaaaagtttggtgactaccaaaatatagatagctctgtagtgtcgttaatctagatgaaaagaaaaaaaaatcagtaacgaatattttcaaatatcttcacatttgggatcatattgacaaagtataaaggcataatattgttgtcactttctgtaaaatatatttctcatcctcacttcactaagcacatagttagctacgactggatgacatcaacagcagcttggggatatcatgttcctatttcataaacagaataataattcaagaggaaaaatatataaaagaattttcagtttttaaactttttttcaattccaaaatttctttccaaataatttgaaaaatgcataaacttataaagaggaaaatgaaagacatctttaatccagacatcttaagtttttagtttcttgaaacttaaacttgtgtctatggacattgatttcttaatataggaccaaatactgttcagcaaaatattttgttatggttaagttttcatgatattaactcctttgtctagcacatgtaaagtgaaatttatcgttgttttcctaattgttctgtccataccaatttgcctccttttttctgagtgcagatttattggaattttttctttcttttctttctttcttttgtaatgtattcagttatattaagtggaagacatctccccatagagaaacgggcttggacctcatctgccttatctgtttatatcttgtaggactagtattctccaacactatgtgtgacttgtctcctagtcattttttaagtcagatgtttagaactagtattctccaacactatgtatgacttgtgtactagtaattttttcttaacttgggtgtttatgctgcagagctaaagttgtttaacaggtaatagttttgcctcagttaaatctatgggtgaagatactgccactgggcaagactaaggtggtagttacaatttgggcagggagacaggcacagagcccttgttagggaatgaaacccagaaagaagggaggggagaactgccagaagatacagcaggctaatatggacaaattacagaaggaaaaaggacaagtggaagataatgcaataatgcacagcctttaaataacacattgaacaacaatgactttgcatttagcatttgcgcagtgctatcatccgaatgtttgtgtccctccaaaattcatgttaaaatcctaacccctaaggtgatgctgttacgagatggggactttgggaagtgattaggtaatgaggaaggagccctcgtgaatgggattagtgtccttataaaagagaccccagagagacccttaccccttccatcttgctgtgaggacacagcaagaaggtgccctctataaaccagaaagcaggccatcaccagtaaggcaatcagcaaatctgccttgattttgcacttcccagtcttcagaatggtgagcaataaatttctgttgttttaaagatacccagtttctggtattttgttatagcagcccaagtagtctaagaagggcagttatatgacaagacttttactttatttgaggcattaatctttggtttcctcctcggacccatattattaggttgatgcaaaagtagttgcagtttttgtcattacttttaatggcaaaaactgcaatttcttttgcaccaataactcttgtcagggaagcagagaaaaaattggaaatggtcccacaattttcagggtttatgttttccaggattttttttttaataagataccatgttttccaggttggaatgcaatggctgttcacaggtgtgatcccactaccgatcagcactggagttttggcctgctccatttttgctctgagctggttcacccctccttgggcaacctgttgggtctcttgctctcaggaggtcaccatattgatgctgaacttagtgcgaacatccgattgctgtagcacaactcctgggctcaagccatcctcccacctcagcttcccaagtagctgggactacaggtgcatgccaccacatctggctttttcaggaatttaaaacagtgactagctctcaagctaccacaagttctgccttgggcagttgacaatgccagttttatggaaacctccccactgtattcctccctaacctgcagtataaaacaaaagcttcactgaacagtttccagagcagaacttcttttcttcttcacaaaataggtctcacccttgggtaaataataggtggcacatgcaaacagttgtctggggaagctgtttatttgtttgtttttatgtactctgagcaacagaatttagaagccagctctcttgtgtccaccaagttcaggcacatgaaagggaacatagtgcttgctttggcagcgtgtacactaaaattggaacaacagagagaagattagtatagcccctgcatgaggatgacatgcaaatttgtggatcgttccacattttttaaattacaaaaataaaaaaaaagaaagagaacataagtagggattttttaaaggattgcaaaaggttcggtgaagagaaatgaaatataccacagaatgaataatatgctagttagtaaaaaatatatgagtgttcaactgaagtatggatcctttccacaataatggacagacaaacccttttgtccttaagactacacaatcctttgttctgattctgtggtctttctcctcatcaactagctgattatgggtctctgctgggcctcctttaggtcctgttcatatctaaagttggcctatgccaacccggtcacttctttgaatcagggctgacttaggaattacagaaaaatcttggtctataggtgttacttgaagtttgaaatttaatgtcaagtgtcttcatcaactttatgtctacaggtctagacatttctgttcctattattatacaaatatcagaggtagctcctcctttaattctgtagttgtctgtaaattcttatgactgccaattataaaactcattttattttgttctgctgctgtagaggaaggggtctatatatccaccccagtgttgataggaagggaatggtaactactctggctactgcctggagttttcttttcttttttttttagagacggcgtctcgctctgtcgcccaggctggagtgcggtggcgcgatctcggctcactgcaagctccgccttccgggttcacaccattctcctgcctcagcctcccgagtagctgggactacaggcgcccgccaccacgcctggttagtttttgtatttttagtagagacggggtttcaccgtgttagccagggtggtctcgatctgctgatctcatgatccacccgcctcagcctcccaaagtgctgggattacaggcacgagccactgcgccaggcctggagttttctttttatttcagtcacttacttgtacatccttggctgaaggatactcttttttcatattcttacatgcacttccattattaactaaaaaattaactaaagaaccatgtgcttctttactggtttttgtgttttatatgaggacatttgtatgtggttcgtatatacaacacattcttctcccaagaatgccaaaaacaaagaaaaggaaaggaaggaaggaaggaaggaaggaaggaaggaaggaaggaaaagaaagaaagagaaacgtaacaggcatggccgaagaagcactctagcactctactcttgagacttgggctgaatacagggcctactttggtcactgttctttaaaacacaaaggatggaaacaaccgaaagtgaagagaaggagctattatgatagaaatgttttatgggcatctctatgagcatagcacatcaagggcaggtttgttaaccttgaagaagaatggctaaagagatcatctaattaatgtcttgaaaagcgtggatattttctagaagaggaatttttatagtagttctccatgccttgagagatccaagatgatgaaagaacttaacataggagctgtttcagcagaaacacacagactcacatccccagcttagctatcctagtgctaaaacatgagaatatgttcattggtggccattgtggaatctctgtgtttggagatctctgagaagagatttgtaagttttggttaaatacctttgtgtacacctgcctgaaggtaatcaaatgactctttaagtttccttccagttcttattctatgaagcaaacacaattttacaattatttttattaattgctgagcaaaatatttattgccaactagtaaatcctaggaaagctgtctcatcttttgaggttgtaagaagtttatgttgtgaagatttgctagccttgaaattctcccttataaaagctcagagtcccagattgcatctgtgatagattgttttgtgatatttggggggatatactttaaaatcttttttcttgttctttatagtcttagcattatttatactttaaaaaaatgtttattttatgccataggttatattttatccttcagagcccagcacaaacatttaaaaaactaaactatttattacatcttgaatattagttttgactgggcgtggtagtgcaatgtagctgggcaatgtgatgaagacacccaatgcaaaaaaaaaaaaagagacagttaattttattatttgaattatcatacagtaaaatggacttcttttggtgtactattctgtgaatattttaatgtacatatagattcatgtaaccaccactacaatctggatacaccgaactcttttaacataagatactctccatattttaatagctttgtcactgaaatccattgtctaatataactgctcaatgagcaaaatacatagtagaatatataatacttactacaaaatgtaaagtagtgttatgtacaataaagtgctttactgaagatattcttaacagatccaagttgctgaatcagacccattgtgttcaaatgaattttatgcaattccttgttattgtaacagctgtcattattaacagacaatagcatatgcacataaatgtatcaatatgaatatcaattctccataattttgaagatttaatagtgtctcataaggttttttagtttttaaaatctaatttaaactatgacatggatttacaatcagactataacttatagaactttctgatttacaatcagattaaaacttatagtactttcactcaattacttcttgtagaatctaccctgattatgttttgttttattttttctttaaaagttgcttagaggccgggcgcggtggctcatgcatatattcctagcactttgggaggccaaggcgggcagatcacgagatcaggatatcgggactatcctggctaacatggtgaaacccgtctctactaaaagtataaaaaattagatgggcattgtggcgggcgctggtattcccagctactcgggaagctgaggcaggagaatggcataaacccgggaggcagagcttgcagtgagccgagatctcgccatgccacgccactgcactccagcccaggagacagaacaacactcatctcaaaaaaaaaaaaaaaaaaagttgcttagaacagattgcagaaaatatgacttccatcataagccatcaaaacaaagcaaactctttgcaacaccagatttttgtatcctaaaaatattacactcaagattaaagaaataggtttggaggtttttttatttttttgagatggcatctcactctgtcatccaggctggagtgcagtggtgcaatcttggatcactgcgacctctgcctcccgggttccagcgattctcctgtctcagcctcccaagtaggtgggattacaggtgtgcaccaccacgcctggcgagtttttgtatttttagtagggacaggatttcaccatgttgtccaggctggtttcgaactcctgacctcaagtgatccgactgccttggcttcccaaagtgctgggattacaggcatgagccactgtacccagcccaagatttggagattctacgcaacttttatgactgaattggacacaataaaaagcttgggtcattctgacttgtctaaacttcctaagaggaattaatactatagacaagagtctttttgatacaccattatgagtcagatctttcagcagtgtcaaatttgcctacctgtttgtagatatatagcatgttaataatttactgtaagccaagtttgtatatatgcaggtaaataatataggtaagatagcattgatttttggttatgttgtctctatagatagaagaaaagataggtttgtaatttttaagtagctaagttgaaaaagtcaagaatttgtgctccaataattacagtcaacacactgaatcgtattctgttaaacatggccgtttctttccacctcttcttcagaaagggggtttattataataatcgtaaacagaatacgattaaaagtacctggaaatttagtacctagtgtcagagaaggtaccacaatagtccaatgtaatgaggttggatcgcgtgtattcttccaattttagtcatttgctttcaaagctattatttcacccttactgataacctctcttcagtttaaaaaaaaattaccattaacattcactcactttttgcaggttttgagcagttttttaatccaacaaactattttaccttacacaatagatgcggtcttagccaataatcttcattgttaataacattcaatggctttttaacaattatatgacatccattgtgttccattttctttctatgtcagtaatgccctgtaaagcattccaactagtaaggtacacaagtatcgctttcataaagctatgctagctgtctctaattcaattacttacctcaaagacttccttcaatgctgcaaatttgtccggacacttccacatttctgatgttcacaggagctgtttgcagttgcttggattgtaaaatgtttctttatctattttccctttttttatataccatttcacttgtcatgaagaaataaatggtttcagatttttttgattcctaaaggatgatctagaagttatagtagttatagtagttacatagtatagtagtttaagtgtgaagaagagcatcttggaggaaaaatatcagtatctctacccatgaagaaagccacagtgttaaagttcaaactgtaccacccatgccactgctcattgctgctcaccactcttcatctccttatttctaagaggaaagcttattttggatatttgattacttacttattatgtctagagggtgggcagtgggtggtgctgctcaaatgagtgtgattcaaggagcagacctccaaatacacttgaaatgcaataaagatcagaaacgacagtatctcccttaattcacagtggttatgttccatgatctccactggatgtctgaaactttggataatactgaactctatgtatactatggataatactgaactttggataatactgaactctatatatactatgttttttcctatacatacatacctatgacaaaatttaattattagtcatgctaagacattgactataacatctaatattatagagcaattattaacaatatactgtaattggccgggcgcggtggcttatgcctataatcccagcactttgggaggccgaggcgggtggatcacctgaggtcgggagttcgagaccagcctgaccaatatggtgaaaccctgtatctactaaaaatacaaaaattagccaggcatggtggtgggcgcctatagtcccagctacttgggaggctgagacagaagaattgcttgaacctaggaggcagagattgcattgagccgagatggtgccactgcactccagcctgggcaacacagtgagactctgtctgaaaacaaaacaaaacaaaacaaaacaaaacaacaacaacaacaaaacaaaaaccaacatactgtaatcgaagttttgtgaatgtgatttctctttttctctggaattttccatttaatgtttttgaaccctggttgatctcagataactgaaatcaccacaggtaagagggaattgctgtagagaggattaaacccctctacattttgcagtgattgctaaatttatcttttgaaaacccattggctttaccccacaatttcatcctgggagaaagtagaaataatgttgaataccttttcagaagagtcagtatgtagttctttgccactaactaatcacgaatcatttctcttataaaataaaaatttgaagttagtttgtgatagttttttttttctttctctctgaatttttagttatggaaaccatagatgcaaaatctctcataggtttaataccgtggtgactgaaatgattaaacatttggctgaaataattttgcctttttttcttaatccctcaatgttaatggttataactctcaatccacctataccactgttaggattttgaatagtaggaccttggtattcccaccacaatcaacctgctattgctgttcattgacctagcaaactaccaaacggttatttcttcatggaatattggctataaatgcattagttgcaatattattcttggtgaacaatcatagtgatgctaaaagggtactaatcagatagtggtactgctcaaaccagtatggttcaaggagcatgtattttgtggtcacaggccatcctctgactctgaaagacaaggcagaagagcttgagggttgcttaagaaagaccactgaggaaggaagaccaggctgcaggtatctgagtttaccttcgagaggtgacagcctctcgaaagatcactgctcaaggagtcattttacctgttctccaggttatctatgtacacctatcttttcatctccactgcacagaactaacgtacttcttttctcacccatatgtgataggcatgtgtcaggtggcacctaggatattcagtagaacagggtgtagataagcaggtgaaaaaattgagactttctcaaatgattgacagcttatgtatgcatcagatctatttaatttttacccattagattgagatatgcaaaaacatgtccagaaaaaggactgaaaatagcagggcaaagtctggtatgactgggtcatcagtaaagaaactccatttaaaaaagtgaaaagcaaagaaggagaaaaatagaagtttcatttcaactaacccaatttattggagtccaactaattttttccccagaataagtgggactaaatatgtaaactattttaatataggttaattaatatcataaatacagattcaagaagaaacactatgagaaaaaaagaaatagcactatgtttggttatgtataggtactaggtgaaggtgaatcttctcgttagttgaggaaccatagtgcatagagattctttttcttctgtgaattatccattgttaattcaagtatggtagtccacccatggttctattccttccttcagcaaatgcttattaagctccacagtgagctagatgttgtgggggctatatggaagcataacccatgggaatacatagaagcaaaatccaagttgctaccctagcagtcaggatcctggcactcaaggatggtaattgatggtgtactcaagcatggcagttgaggagatagtaatgaagggagtattgttggcagggttaagggaaaccacaaggggtggtgaagcacatgagactaacaacactggggagccattaccacccataagcctgaagaggtcaaggaaagggctgggaactggaacccaaggctagccggagctgtggttgtggctgtagctggaggaaagggccacctgatgaatgcggtggccttcaggaaataaatgctgacccggtgcatcccagcctggtgggcactgggcagcaaatgctacacaccctctcctcccacccactgattcctgctggtggcttgcactgtttaaactcaaccaagagccagaaaacaagggaactcattgacataattcagaaggtcggtgtcctgctatacagagcagggtagagaaaggtagaagatggttctagaggggcaagtggcatttgcagcatgctgccttgagacatacatgggaaaaaccatagccacaaaataaagctgtgatacaaaagatgtcacaagatgacagtgagtggtatagacaataggtccaggttaaggatgtaatataacttagggaagatccctagaagaaaggaatacttttttgggttgggcctttaagaatgagtaagaattagattagcagagaggaatatggaggacagggagaacagtggaacaaagacatggaaatagaaataaatatatagtatggctgagaggctgtatccaattggctgaagcacagaataggcagatgcaggcatgagttcgagaccagcctggccaacatggcaaaaccccatctccactaaaaatacaaaaattagctggccatggtgtgcgcctgtagtcccagctacttgggaggctgaggcaggagaattgcttgaacctgggaggtgaaggttgcagtgagctgagatcgcgccattgcactccagtctgggtgacaagagtgaaactccatctcaaaaaaaaaaaaaaaaaaaaagattcagtttcttgggagtgatccagttccagaaggcaataattgagagtttgactcagcctgaacctcatctagtttagacaggaagaaagtgaactgtgctcttccaaagcagttctgatgaatccacaacaggtggtcactaaatatttgttgaccaaatgaataagtaattaaaattaagtactagaaatttctatgttttgaaacagtgcataagatgaccgtttatattgatttccaaaatctaatcatcaagccaggcacggtggttcatgcaccgttcatgcatggtggttcatgcactttgggaagctgaggtgggtggatcatgaggtcaggagttcgagaccagcctgaccaaggtagtgaaaccccatctctactaaaaataaaataaaaaaaaattagccgggtgtggtggcaggcacctgtaatcccagctactctggaggctgaggcaggagaatcacttgaacccgggaggcaggggttgcagtgagcagaggtcatgccattgcactccagctaatcatcatgcagacccactgtgaaagcaggaacctggtctaccttgttcttaagataatcccatctcccagcacagagcccagctcagagctacagcaccatcctatatctgttgaataaatgctgggatacattaataaatgaatgcatacttgaatgcatttatccttttacagtcgggtttcttggggtggtgatccctccctacccttttcaggtatagttactgttaaggtacattaagtagtctgtcagccttttaatgactacttgttttttgttttgttattctttttcttttcttttttcttttttttcggagatggagtttcactctttttgcccaggttggagtgcaatggcaggatcttggctccctgcaacctccgcctcccgggttcaagtgattctcctgcctcagcctctcaagtagctgggattacaggtgtccgccaccatgcctggctaatttgatatttttagtagagatggggtttcaccatgttggccaggctggtctcgaactcctgacctcaggtgatctgcctgcctcggcctcccaacgtgctgggattacaggtgtgagccactgcacccagccgactacttgtaagtgcttcttaatttttcctcactttaatttcttgtgagtctcagatgtacagttgtttaaatagcttaaatataagagtgggtaaaaaaactcaggccctgaatcacctttgagaggcaacccacgagaacaacccatttcagatgcagggcttctgtctccagcctccagcccagggtgtgcgcacctgcagctggcctcagtgacactcgctgcagcggaggtggctccggggctccttttacctttgttcctttctttaagcattcaacttcttttcccactgccattaaaatcatattaagtaattctgaagtgcttcccataaacaccaaatgagaagtacaaccgtgagaacaattacctacctgtgtggaataggttattattttaatttgtaatctgagtgacattcattttagagaagagagtattggggtgtgcaccctccccacatgccccatttactgaacaaagagtgagccacttttttcgtcttccttaataggtagctttaacctcactgccttgttaattatgatacctgagggtaaattcctgtttactggcttttaaacattacaatttttatctgccatcggacacaaagagagagctaagttcaaacttattttatggcttatagaagctgaaagtcagacaaggttaatattgtcagatgatgataaatatgtggtaattttaactttaaagtggacagccctactttgacggtgaattacatttgcacaactgaatttctcattgagttgaatttcactttaacaattcctgcctctgtgaggacatccaaggctttcaggtgtctctaaaatctgggaaaacctactgcaatccaattgtgggtgacctcacaacaatttgttgctctgtgcaacaaatccttgtgtttatatttagaaagaaatagaaaatgactattagtgccgatagcaccctgctgacctgaagagggagtttgtgatggagggggttttcagaatcttgtgcctgagataggatgaattcttttcacttgaacaaaagattatttatgatgaaaaccttaacctatacactgtaagacagactgaaatgtaaaaaaggtgaaaggactctgaaacacatggataaaaaaatgttttaaacatgtgtgctaggaatacaattatgcatgataccttcagtactgagtatttgttctaatttgtgaatttttttcttgtttcaaagattttccctctgctaaatatacttagatctcaatgtgcagatgtctttgccagcattcagtttctaatgtatacgtaatattctaagcaagtttttagtagagattatgaaattaaactgatacatttagtttttttccccaataataattattgtggatgctacatagaaataacacaatagtacatattttgaacagagttgagaccactgtagcattccaattggtggattttctttttctttttagaagttcatgaagaaacgaaaaaaaaatctgctttggtctgaaatatgagacatgaaatctcagttgaggagtataatttggaattatttaaacatttttcaaatgtcttctgaaccctaacaaatttcaaattgacaaacaataaaattaactaggattttgttatttcccatcacctctttcagtaagtaagaaacaaagatggtctactttttcactgtattgggcaagctgtaggcattttagcaaataagaaaaaaaaaagacatggtgatttaggatttttaaatttaattgatgggctataattatttaatttaattaattaatttatttatttttgagacagagtctttctctgttgcccagggtggagtgcagtggcgcaatctcggctcactgcaacctccacctcccaggttcaagctattctcatgcctcagcctccaaagtagctgggactacaggcacacaccaccatgcccagctaatttttgtgtttttagtagagacggggtttcgccaggttggccaggctggtcttgaactcctgacctcgtgatccaccactgcccccaccggcctcccaaagtgccggaattacagacgtgagccaccgtgcccagccaataatgttaaataaaaacatttaaaataaatcatctgtaattccatgtctgatagggtaggcaaggctgcaggaacaaagacacccaaacaagtcatggctcaggacaatggaagtttagttcttgctcgtgttagagtcctgggaatataaacagaatcgccagcagctctcctttacacactcatttagggtaccaggctgacagagactttgccgtcttcaaattatggcttctatagtcactatggttatttccatcacagccaggtggaagggagaaagagtacagaggagtgagaatgggagggcattatgggccaggcctgggagtggcacacaagacttctgttcccattccatgtggctggaacttagtcacatgtccacctaactgcaaatgtattctagctctgtgcctaagaaaaagggtatatagattttggtcagtagccaatagcctctgccacagtctagcaccctcccggcctagcagagtgtgtgatatatagtattccattatcatttgttgaattgagtatgtatatactgctttccaaaaacatgtatgtttctatgacgacacaataggatagtcatgctatttcctgttttgctactgtgacttcatagtttattacttgtttaggtagttacttatgtcccaatttgttataaaaagaattaaagatacaataatgtggcaacataaaataacttgttattaactaataaatatttttctatgcttctgaataggcttaataattgcaatgctacaattaaatttattaaggcttattccaaatgttgacatatttttgcttttatacatatgattttttcttttcttttctttttttttgagatggagtctcgctctgtcgcccaggctggagtgcagtggcactatctctgctcactgcaagctccgcctcctgggttcacgccattctcccacctcaacctcccgaatagctgagactacaagcgcccgctaccacacccggctaattttttatatttttagtagagacagggtttcaccattcgcaggatggtctctatctcctgaccttgtgatctgcccaactcggcctcccaaagtgctgggattacaggcgtgagccactgtgcccggctacacatatgatttaacataactgtaaagggattatttttgtgcacatatatatttatgttggttgaagtagttgcttacaataaatactagaagtgaaaatatcagatcaaaagaaataaacattttcatgatttttgtgaggtatttacagtattggcagaaatgagtgcaaagttcagtgaggccgcaacctcattagtctgaatggcatttgaaacgcatttcaatgcctaaaatgtgcaaaaatgataccaattgttttaatttctatttctttgattgttagtgaaatttccttactacttttcccctctttggggaagtaattcttatctctttagatttgatgacttattgagtgctatcattaaacatgctacttggaaataaaatttatttttaaaattttgccagggcacgggaagtggaaaaaatggggagatgttggtcaaaaggtatgaactttgagtaataagattaataagtatctaatttacagtgtaatgactataattaatgctgtattgtatacctgaaatgttctaagagagtagatcttaagtgttctcaccccacaccccaccacacaatggtaactatgtgtggtgatggacgtgtcaactaatttgattgtggcaatcattttacaatgaatatgaatatcaaaccatcaggttgtacagcttgaatatatacaatttttatttgtcagttatacctcaataaagctggaaaataatttgttttaaatgggatataaataatgtctgtacgttttgcttggttgggaaacaaaaaaacactagttaattgggagcccttttttctttttctttttctttttttttcttttttttttttttttttgagacactcttgttgcccaggctggagtacaatggtacgatctcagctcactgcaacctctgcctcctgggttcaagcaattctcctgcctcagcctcccgagtagctgggattataggcgcgccaccacgcccggctaattttgtatttttagtagagacggggtttctccatgttggtcaggctgatctcaaactcccgacctcaggtgatccgcccgcctcagcctcccaaagtgttaggattacagatgtgagccactgcacctggcaagaagctcttcctcttaattttatgttattaagaatctatggctctatgattcatagatactagctgtatgtgactaatatttcttagttttaggaactttgtacaaaagattaaacaataatgtgttgttattttttaagaatatttcaaatatcagaagatacagaaaaaaatagtgggaaaagtgaaaaaaccaataaaaataacaagagaaagccctgggttcatggtaaagttgagaattaaactgaattacagcgggaaacagaagtaaagaagaggcagaaacacgaagtaacatgggagaaagatgaatagttttggtcctatacttataataaatgaggatgtgaattattatatagtgattttcatctcttaagtagacatacattccactagaatgcaagctctgtggtgacagtaatcttgcctgttcttgactgtattcccagcacttagaagggtgcccattatagtggtgggcgtttaatgataatttattaaaatagatttgtaagccaaataatttccaaatgggaaaaatatacaccttgaaatctcattggaaaggtggcaaaaaaataatacaagatggtacagtgaccagtgattgtttgattcaaacactgtattaggtccatgcaagtactgtaaccacctggttacaaacggctcacagccttttaagttgagtggccataccaaaagaagccttggaaggggagggagaatttcaccccactataatctcaatgccatctcttcttcaaataagtgtgctctaataaggagaactgatgcttttattagtcttaaaatatgaataaggccgggcgcggtggttcacgcctataatcccagctctttgggaagctgaggagggtggatcaggaggtcaggagatcaagatcagcctggccaagatggtgaaaccccatctctactaaaaatacaaaaattagccaggcatggaggtgtgcgcctgtagtcccacctactcgggaggttgaggcaggagaatcgcttgaacctgggagacggaggttgcagtgagtcgaattcataccactgcactccagcctgggtgacagagcaagactctgccaaaaaaaaaacaagaaaaaaaaaacaagaataaaggcatctttacaagactttattctctcatgattttaaacacacagtctaaataaaaagaaaacccttattttaataaggagtaatgataattcccttatacttttctccttccactctgattgctctttctggatagaattctggaactgccattgtgtaagacaaagaaaataatgacatgaataactattatacaaggttggaaatgttaagggccctaagaaatgtttaggtaaagtattatgagggtttgggaaaaggaatgatcatcccttctatcagtcagcatctttggttgcaaacaatagaaactcgtagtggctaattttacaaagaacttcaatggacgggtaaggagttcttcgtgaaattaaactgtaggtcaaagaacccaacacttgcaagaactagagtagggcagctacagggatccacaggtaggagtcattgctggcctcttcggggcatcagtgagctccagccactttctatgctcacaaaacgagtcaagagtcaaattgcagtgagagacagagagagagagagagtcctagcaagtgcacaagtacaattctgattggcctagcgaatctcatatctccatcccctcaccagaaagcctgggacattttgagttataattctatcaagactgcatgcatccccaagattgattgtattctcaaagcaaaaccaatgcatcctagaagaatccaaatcattctgaaagaatggtgaatgaataatgtcaggcaagaaaaaagccattggtgtccacaatacttattgggcttgggatagaggagtcagagaaaccatcatgaaagagttaatattggaattaggtcttaaaaatacacagcatttgaatatgtagggatgaagaggaagggttaggtttgaagacaagagatcatggtataaacagaggtacagatgatggaccagagaacaaagtctgtcctacagaggtatacagggaagagaaaatggttcagttaggatagagtatagagtaagaacaagccatgaagaatcatgaatactagcctaaagagtttggattttattctgtaagcaactgatgggctgatatttttgagatgggagatgtagctatgtaattagatattggaagtagttatgtagttttttaaagggaagatatctttggtgacaagggatggaagggaggagaagagattagatgcaagaaaaccatttcagacatattgcaaaagtttggccttgaattactaaggagctgaatgagtatcatgactgtaggaatacagttgaaaagagaggcacaagaaacattataaaggcaacatatagcaacagggcttgctgtcaaccaataccatatgaagtgaagctgaatgtgggaccgaagactctatcattaaaattccaggaaatatcgtgactgagaaacactaacaatgtggccgggcatggtggcttatacctgtaatcccaacactttgggaggccaaagtgtgccgatcacttgaggacaggagttccagaccagcctggccaacatagcgaaaccccaactctactaaaaaatacaaaaaattagccgagtgtggtggcacctgcctgtcatcctagctacttgggaggctgaggcatgacaatcgcttgaacctgggagtgggagattgcagtgagccgagatcacatcactgcactccagcctgggcaacagagtgagacaacaacaacaaacaaacaaacaaaacaactagcaatgcaattcagccactgttgcattccaagttctttatcagttaatcaaatattcttcatgattacaatcaagctatttgaaaaaaattcttaaatgcatgaatacgatcctatagcttgaaacttcaaagtgaagggaaccaattctgacaatatatatctacctttcattaaaaacaacaggaaagacactccaggactggattggcaaacttcttctgtaaaaggtcatatggtaaacattttaggctttctgggccatacagtctctgctgtagttactcaactgcatgaaagcagctgtgaataatatttaaatgaatgaatgtggttgtgttccaataaaacttcatctgtggacactgcaatttgaattttatataattttcatatgctgtgaaatattcttttgtttttttcctaccattacaaaatataaaaactattcttggctcataggccatgaaaaaagagaaagtgggctggacttgtcacttactgttagtgtcattgtccactacgacagcactggaaatcaggaccaacctatctttcatgagtcaataataatatgaacctattctgaaagtagtagttgaactaagagaaggaaaatatgagaacagattaatatctcaataatttattctgttctacttgtttttgtttcaaatgaatggagttctttttaaactttctttcctaatgtagcaagtttttttttttttttttttttactttcctttctaatgtagcaagtttctttttttttttttaaactttcctttctaatgatgtctgtattgttaaaatacaggttaggctacagtaacagaggcattctaaaatacaatggtttgaacaggatagaaatttatttatctctcaagtaacagtttgagtataagtagtctgaggcttgcaggtaggcttgggggtgtcagaggtgcaagctgcttctgtcttttgctccatcatcctcaacccacaactctgaactcaaagtcatgatggctgctccggcacctaccatcacatttgcatcccaaccagcggtaagaggagaaagaagcagcaaaggccacactcctttccttcaagtgccagcttggaagttgtatatattacttctgttcatatttcgttggtcagaagttagcgatgtacctacatctagctgcagaggaggtaggggtttggaaatataatcttcatctgggaagccatgtacccaactaaaatgggggcgtctatccttttctttcttttttttttttttagacggagtctcgctctgtcgcccaggctggagtgcagtggcacaatctcggctcactgcaagctccgcctcccgggttcacgccattctcctgcctcagcctccctcagctgggactacaggcgcccgccaccacacccggctaattttttgtatttttagtagagacggggtttcaccgtgttagccaggattgtctcgatctcctgacctcgtgatccgcccgcctcggcctcccaaagtgctgggattacaggcgtgagccactgcgcccggccatgggggcgtctatccttaaagagatggatagaatagatattgttaaaaatcggaagacagtaggtgatctctgccaagcgtcgcatattactaaacaatttctatactctatacagagatcattttaattgcttcaatcgggggaaagaagttattcaaaatatgtttaatgattaccttaaatcctaaaaatcagaaggagttattctggtggcagcctcttttccaaggcttttaccttggaaaaggtaaaagcttccataaaatcagaaatttattcagcaaatatctttgagcacctattgtgccaggcatttttcaaggcaaataaatgtccccgtttcccacaccacaaacaacgtttactctaacacatcatctttgttgaagacattaccttgattgtgtagtaaaggctcctaaaagcatggggaatgaaagatgggagtcctggtgttagactacaaagtgaggggtgctttgaggtggtgaggggcaggggttgggagtggtctccagcccttcaaactctccattagccctacaatttcacccccagtaaacatggactccaaacaacagactgttttctgtgtaaacatatatatatgttgttttttttttgagacagagtcttcctctgttgcccaggctggagtgcggtggcaccatctcggctcactgcaacctccgcctcctgggttcaagcgattctcctgcctcagccacccaagtagctgggaccgcaggtgtgcgccaccacaccagggcaatttttgcatttttagtaaagacaggatttcgccatgctggccaggctgatctcgaacgcctaacttcaagttatccgcccgcctctgcctcccaaagcgctgggattataggcgtgagtgacagcgcccagtcgtgcaaacataatttcaagagaagttctctgtctcccttttctcccagattgcacctattcgttttagaaattctagacccctcctggtggggggattgggactgatatttaggtagctcgctcccaatgttcccaatgggaaaataacagcggatcctcaaataagagcctacctgcatgtgcttgcatctttcccaagttgtattctctaaaaagaaagaaaagcaagctggcaaacactaagcactccactggcatgacttcagaatgcttgtgattaagatattctgcttattgttagtcaaagatctaggcctgccttgctccacataaatagaagctccgtttctcagctgcctgcgcgcatcctcttacatgtccttagggtgctagaacagcaggacttctctaaatggttcttagactcgaagaacatgaaaagaagcagtgaagggctcctgaaagcatttacattgacaagtaatatgtatcgacagtacctttttccttttcctgctataaagtgaaagtctttgtgtgccgctttccgttgttaactccaagggtaattgaggcggcagcagcgtggccagcaggaggagttggctgaaattaattaagtgaggcggtttggactgcaccgtcctcactccccggccactcccttgtactttaactggttgggattcaaggggcatggagcaggagggaagagtgacggggccatgcaacgtagaaagaaccagaagtatttgtttggagttcggtcatttgtttcaggtggttggaaaagccacggatttaaagaaaaagcccctttggtttctatagcatgagtcaaagcaattaagtaccaataacagctaacacttattgaaccccttttatatgccagacactggtttttgttgttgttgttgttgtttgtttgtttgtttgtttgtttttagatagagtctcactttgtcactcacccatgctggagtgcagtggtgcgatctcggcttactgtagcctcgacctcctgggctcaggtgatcctctgcctcagcctcccaagtagctgggattataggtgcatgccaccatgctcaactaaatttttttgtattttttgtagagacagggtttctctatgttgcccaggctggtctcaaactcctggactcaagtgatctgcctgccttggcctctcaatgtgctaggattacaggcttgatccactgctcccggcccagacactgttctaagagctttatatatcattatcttatttgattccaataactctctgtggtaggtgctcttattgtttccatctttcagctaatgaaactgaggctggaagaggttaaggttttcagcagcaggcccagaattctatcgttggcagtctgactccagagaaggaagccatccactgtgcagggcagtgatgcctcagagatagtcgaatgcctgattgttatttccctctagatttacatccttgatttttgtgccagatgagggtatagatttgtatgtcttagttgaagaggaaataaagttaaatcataaagaagaaaatgctagaaaagtatgatgttcgaaaaactgcaaagagtttgtgcctttttttcccccaactggctgctaacacatttcttgctgtagagaagtacatacagtacaacagtactagattctatataaagcaatttattattttttgaaaagtgataatggccttgttttcatcttaagagttgagagtggcaaaagactgatagcaccctcagaagcatgcactcagcaagattccctaaatagttctttcctctccagtcctgaccaagtaacctctgggccattctattcccgggaatctcctgtatagggccctgaagagtatgctgatgcctgcaacatccttttagggtttgaagacctgtagacaaatggctcctggggacagggaacatatcaaaacataatcctcactcataacagaattgagtttggtttgaacccagcaatcaaggaatgaaaggtgagtgcattaacctaccatgttatctgtataggagttttatatcttaaatggaacagacatccctgcaaaacaataatggactgagattaatgagttacaggtgaccctcagacacgggaaggttgactttggataagcacccacaaaggtcaagtgcttatctgaattaaccacaagtcttggatctggggtaaaaataaaggacgagaaataccccagggagaggctttctttaacctgagttttgtgttctttcttaccttctgctaaattctgcattggattggacaagcccttttcttgtgccgtttccacacacatctctggcctacactagatcttagcattgtggaaacagcatgaaaacccagagcaatgcttttcagacatccagggtctcaggatgtatgttgtagatcaaatatttttgttaacatagcattgggtctttttgacagagagtttatgacagcaggatggaatctttgtaactatagtcacttttgcctggtactgacgggaggatttgcatatgtctcatcgtacagtacaaatatggaggggtaacgatgactttctctattgattactcttgcccttaggctagttttaatgtttccatttaagacaataactcatccccagagcagtgctgtattttgggttattgaaaaacacacctgaccacctacctccattaaatggagttatatagcaacctagtgtattctctggagagagtatctgctgggccctatcttaggagacgagagggaacagattggtagagactggggatggagttgagggggctagggacagacctagatcagcctttagaagttcagtgtagaaggtggagtgttcccttggcaaggtgagcagacactcacttaaatacaaaacaccagggagtctccactgccagatagaatcctggtccaggtgtgttgtcaataatagagagacacaatgagacaaccctcatccacccgcccctgccagaacttggaaataagggaaataagacacctaccgagagcaaaactttaaaaacaacgtgaactaaaacagagcatagatatgcaaagttttcttagggccctaagaaacctcatcaaattcgttaacacatgcaaagaaagaatgtgttaatcagaagggggttggtgaaccctgggaggtagggggaaaaaaaagagcccgtaaatcaaaggcagtggagctggtccaggcttgtccctggaaggccagatctggccaaagtgtttcagactgggttaagcatccactaaacatttacccaacaaatcggtatggagtgcctacaatgagtcaggcatatatcagactctgggaaaaagtgccaagcctggagatgacctctagaggttgaagactgacctgagccaggcacaaactggaaggagaacacaccaacataatgaaggaaacttgagactgagaacttgcgggtctcaggaggagatttgcctgaggaagtaatactagatctgagagacaagggcgtgtgggagtgaaacggtgcaaagaggtgggtataaggacagtaacttgaacagagcagcatctgctcaggcaaccaggctggaaagatcttggtttgcagcctatctgggggatggaaagaaggcaggcgtgactggacccacagtggttttcaagaataacagataatatttattgagtttttggtagttgccagacatggttgaaagaagtttactcttttaattttcattataatcctatgagataagcactatctttattcctattttattaaggaagaaactattgcacaatataagtaaagaaatcacctgagctgggaatgagaggaacaaggatttgaaccattgaggtgtggtcccagagcccacactgctatccagttcttatactgaagacaggggctgaagtggccagaccattgtaggactagtaggttgaggattttgtcttcttttaagaacaatatacagttttaggccaggcacagtggctcacgcctgtaatcccagcactttgggaggccaaggcgggtggatcacttgacgtcaggagtttgaaatcagcctggccaacagggtgaaactctgtctctactaaaaatacaagaattagctgggcgtggtggcaggcgcctgtaatcccagctacttgggaagctgaggcaggagaatcgcctgaacccgggaggcagaggttgcagtgagcagagatcgcgccactgcactccagcctgggtgacagagcaagactctgtctcaaaagaaagaagaagaggaaaaaaacaaaaaggaagaatatacagttttaaaggagtggcctgctaggatgtgtgctccaaaaattatcactctggctgcaatgtggagaaagagtcacttagctaccatgtctctaaagcccgactgtgatttttcttcctgtgtaagtctgctgagaaagacaggatgcacagatcatatacacttcaagaattttgctcagcaagtcaattcttgactgcagggagagaagatgtagctcgtgtgtgtgtgtgtgtgtgtgtgtgtgtgtgtgtgtgtgtgtgttttgttgtttgtttgtttgtttgtttgtttgagacagagtcttactctgtcacccaggctggagtgcagtggtgcaatcttggctcactgcaacctccacctcccgggttcaagctattctcatgcctcagcctccaaagtagctgggactacaggcacacaccaccatgcccagctaatgtttgtgtttttagtagagacggggttttgccaggttggccaggctggtgtcaaactcctgacctcaggtgatctgtctgccttggcctcccaaattactgggattacaggtgttagccactgcgcccagccaatcatgtggcttttgagcttccaggtcttgtaacatttatttctcaatgtaaattaacaaaatggtactctgatttggtacattagacttaggagaaagattaggcagtctgccctaggacgattgatttactttctaaaaatatgaagtttctggtttgctatattaagaattgggccttttctagaccacagtaaattcaacacagcaataactttgcctgtggctgctcaggagggagcctgctctgctgccttttccccaagagtggcaactgacaacccacaccactcaatttctctgggctgtgcacaataaccacaagtcatccttgtcttcttgttcttcctctttctcttcattctcctcctctttctcctcttcttttttcttcctcctcctcctccctacaaggttttcagaaacctaggcaggtaggcagtactaggaaagtctgtcagcagttttcagatacagagcacttaaatggaaaccaataagaacaatataggatctcagacctcaaagaattgtggtattagacagggaaagaagagagaaattcatgtaacataactggggagccagagagaacctagattttggtttcacaatagaagcttagggtaagagccatacagactggagaaggaaatctggataacactgtagagatggtatttaaagctgtgggactgacaacatcgtctaggaatcaaatgttgttagggagaagaggtctgagccctaagttctggatcactccaactcagagtcagggagatgaagaaatatagcctaagacaccagagaaaactcaggagagcacagcatcctggaaggcaagtgaaaaagtgtttggggggcagagagaggaggagagcgcttagatacatgagatgcttaagtacaaataagatgaggactgagaactggccaatggatttgtcaatgtccttagtaaactgaacacaggacattttgatggaatatttgctgtggagagggaagaagtagtggggaactgattgaattgggttcaagagagagtaagaggagaaaaattaccagtgaatataaacaatttcatggagaagttttgctgtcaagaggttcagagaaatggagcagtagttggagggagatatggcatcaaaagatttttgtttttattttattttaatttaaaaagtttttttttttttgagacaggtctttctctgtcacccccaactggagtgcagtagcatgattctgcctcactgctgcagccttgaactcaaaggctcaagcgatcctcctgcctctgcctctggagtagctggaactagagatgcacaccactacgcccggctagtctttaaaaaaattttttttttttctggagactgagtcttgcttttttgcctaggctggtgttgaactcctggcctcaagggatcctcccacctcagcctcccaaaatgctgggatgataagcatgagccactgtgcccaggctgttttatttttatttttattttttgagacagagtttcactcttgtagctcagactggagtgcagtggtgcaatcttggctcactgcaacctccgcctcccaggttcaagtgattctcctgcctcagcctcccaagtagctggaactacaggtgggtgccaacatgcccggctaattttttgtatttttgttagagatggggtttcaccatgttggccagggtggtctgaaactcctgacctcaggtgatccacctgccttgggttcccaaagtgttgggattacaggtgtgagccaccgcatccggcttattttatttttaatgaaagaaacaagagcctgtttatatgttattgcaacagtccagcaaaatgagggaaattcatgatgcaggagagaggggagggatctagtatgtgagtcggagactggtcttgattggcctcaataatccatccaaagtcacagaaggaatggtggggtatacaggctctgatgctagtagctagggagatgtaatggtgggacatgaagaagattgtcctgggcgcttctattttcttggtgaaacaggaagccagtgaatgatgatgggtgggcaggttgtgaaggactgaggagagaagtgatgaaagagttgttgagaagggtggaagagggaatggacgaggacaatggatgacagctgggcagcattcatggctcacaggaggttataatgaccatgatttagcctgagaccaacaagcatggttgtgtgtttttctccagcacatttagtggcagggatgcagacacagaatgggcaggaagtcggattgaattggggtgagaatttgccagtacagtacagtgagagaggagcaagggagttgagggagcttggaaaagaaaggctgggcacgacggctcacacctgtaattccagtgttttgggaggctgaggtgggtggattatgaggtcaggagttcaagaccagcctggccaacatggtaaaaccctctctctactaaaaatacaaaaattagctgaaagttttggcgcacgcctgtagtcgcagttacttgggaggctgaggcaggagaatcacttgaacccaggaggcggaggttgcagtgagccaagatcacgcccctgcactccagcctgggcaacagaacgagattctgtctcaaaaaaataaataaataaataaataaataataaaaataatgatgacttttggaatttaagcagggtaagaaggaggaaagtgaggatgtgtgaggggtgctgacagagacaggcggtaggatccacctcgtagggctctaaattccagtggagtcaaaaaaatatgtgctccaaatggcatttctggcccttgtgctaacaaatctgtccaaatcctagtgttcaaatttatttaaatattgatggagataataataacaaacatatacacaaattgttcatatttttcttctttaccagaaaattaggatagtgccccaacctcaggtttatagtctgtcagtgattcttcaaaggtttttagagaataagaggaagaccacagaaaggccaagataagacgaaatgtcagaaaaggaaaggtctggagaaaaagccttttaaatacaatgtttggccaggcacaggggctcacgcccataatcccaacactttgggaggctgaggcaggaggatgacttgaagcctggagttcaagaccagcctggacaaaaagtgagagcctggctctacaaaaattttttaaacatagccaggtatggtgccgtgcatgtgtactcccagctactcaggaggctgaggcaggaggattgcttgagtttaggagttcaaggctgtagtgagctatggtcatcccagtgctctccagcctgggtgacggagtgagaccccatctcttaaaaacaaaaagacaatgttttacctgagaacttagtttatggatgatatcaagaaatatcactgtgggaaatatgtgctagaaacttgataatcacttcactgaggaatatggctctgaaatgctggcagatgtctttgtgcagtgaccacaagataggtagttacctgaagcttatcctgtgggaattctcatgtttatgaccctctggtcatcagccaagggttatttggtagtttagacttttaaatcagaaatgggacttttacatcatttggaccaatcctttccaactgtaaattttatcagtttatagttgataaaattgggccctagcaaggtgaaatctgttttctatattctgtggtaatacaggagatacattctggcctctggctgggatcaaagtatccccttcttccaagcttctgtgtgcgactcgtttcctgtcatggcctcccttgtcctgtattaaaagtgtggcttgctctcaggattgagatgcccttcccatgacccaggaagcacaaacttctggcttcctgtactgttatgcatgggatggagcaagaagtttttgtttctgtttttcaaattggatacaaactttattaatgagaaccatcaaagactgagggatgaggagggaacaaggttttcatccctctttagaataaattatatagaagagaaataaagatgataagtgaactttgttggaaagagtataggttttggagttcaacaataacactagtcagtatacactgagtgtttactttttgctggcattgtcctctttcacatcttgatgtcactgattactagcaatgtggtctttggcaggttacctaatttctctgaactttatttatttatttatttatttatttttgagatggagtttggctctcgttgcccaggctggagtgcaatggcgtgatcttggctcactgcaacctctgcctcccgggttcaagcgattctcgtgtctcagcctcccgagtagctgggattagaggcatatgccaccacacctgactaattttgtatttgtagtagagatgaggtttttccatgttggtcaggttggtcttgaactcccgacctcaggtgatccccccacctcagcctcccaaagtgctgggattacaggcatgagccaccacgcccggcctgaactttatttttttttaaacaaaaatataagtgcaaatacttttttacctggtttttattgtacaatatgaaatttgataggcatgtgaaactatctggcatataacaggtgctcaataaatgttcattgttctttctacctttcccctcaagattcctgaggtttaaaaataccttttcaggttttgagctgttcaaaaatgtcaacagcaagggtggaatggttatgattagaaccgtttgatagtgtgtattcaattttgtaatgtgacctgatatcaacagccaagatctttgtcctgaagggaatttcaatattcagcaaagtggggctgatttaatagccattatttctgagggtatgttcaagttcaaagtccgtctgttttaaatgcaaatcgctctttttcatgtattttgtatcggaatttaggaacaaatgctgtcatttttctttttctttgcatggtattgcaggcacctttattatcacagagccctattattgtgatacctcacacagaaaatgcacactctgacattaggcaccaaaattgctgaaatatcctgtgttttctattcattaaagccccaaagcactatgtgcaaattcccttactttaattacacacctcagggatgtgcatgccaaaaaagagccagtcagacaaaaagccagacctttgccaaaaaatcccagccccttaaactggtaaacatttattttcagctgggaaatctgctattaattcatatagtgactttcccagctgaaataatgagtcaagccaagtgaaccaaatgttccgcagtgagcaaacatgaacagtagggaagcagcccatctcttatttacatatttgttctttcagcacttaaggaatatgtgtatatttcccttttacctgggagtgtatcagtattttccttttacctggacgtataccagtgttgatgcttctagtgtctcagtttccaaaaagaacttatagactccattgtaggtaggtgctttaggaagaggcaaatcaccaaaccaaagtatttgttagagtttaagagcaaaaccttgccaccagcctcactgactttcctattttattgaagttcttaaaagaacagaattagagaaaacatggggttttgaggaaaatgctctttcagaattatttctgaaaaaaaattaatgaaaattctaaacttatgaataagaaaatatattgtttcattaggcaaagtagggattaaaatatattttaaaagatttttaaatttttcagagaattgtttttcatttccatttaattacaagctttgaggtgtggaaaataagaaaggaaatagctatccacataaactttatgcatatgacaaggtagagtattatttacactttctttttaaggcctgaatgcacacaaaatacactcagatcctagaatagtaagttaccctatgtgtgtagaacttagaataaaaagtagtttgtatagaatagcatgcatgaaggcttcatggacagcaaagaaggaaggagaactcgttaaattaacacatgaaatagcaagtcagagaatcaaaaggccaatacattgattaattcctatgatgatgtagagtatctattcagcagtcaattaaccgtttaacatattcttgatataaaggaagttaaaaaaatctccaaactcatataaagctataatccataattggagttttaatgcctctcttaatataaggttgaatacagagttttaatctattctcaaagaataaaatgctttacattttaatgaaggtgtggttttgataataacaaacctgagaaaaagtagcttttaattcgcaacactttaaaatcaaggaaactacctttgaacctttttttctaaatgaaatttttagcagacacatgtttttttagcaatgaataaaatggatgagaattcttttttgttctataagaagcagcaataccctattaattttgacagacaacttggcattagccattttaaaatccaacgtgggatgaagttatgcattactagtctctctacatttttgtcaagagatgaacattttgccagatttttaataatatgccaagagctttgtcagtcagtttatttagctctgcatggttatgccagtttttgtccaccaccccactgggtgtaacactgcccgccacagctcacataactcctcccctgcaattagacaaagtcaacacagcaatcactcccaaccgcccttgaggtacctgcactatcaacagtgcagattccgaggcttgaacaagctttgctttgtcactgcctccctaccccaattaggacttttttcagcccaggcaatttagcaccaacaccatgggtggaccagataactcttttaaaaaagcccgtttaagtcattcttctgcccttccccctccagcccaacccaatcaattctttctcctccctcttttcactacttcctccactgccgtcccctccctgcacctccccccagcccccgagaaagcaccctcagaaagcaataggagtcggccagaaggcaacttgcagtccctaactagttaccatgccgactggagcctgtgctaaggaatgtgctgctgccacactgaactcaatgaaaagatgaggaaaatgtgcaggcaatactagtttggctgcgatgctggggaatctgagacagggctattggtatggaaggatctcactgcatgcaatttgcaaacatgccaactcaatagcatgtgataggcactggatggaatttagaggtcttggggtcttaaagggctggaatggaataagagagctgaatggggggaaatgtgcccccatgaaacaacacttgccccttatatgtgatttattaattttaataagaatctgtgtaaattgttaaaagagttaaacttgttataaacccacttcttctgagtccaatcattataccttcttgttaatattatctgcatcttaattttgactggccataagaaaaaaaataaatctgactttctgacttaaagagtcagcagtagaattcatatgacaccaagtttgtgttttcaggagctctgatggagttgtaaacagcaaaaatattttctgaacagttgcacagagaagagagttgctttaattttgtgtggggaaaggtggaggcagaaggcagtccatgaagagcagaattttgagaagtgaagagttccatggtctttccatccagagggaggcagatttgggtttacactagggtatttcaagggagtctcccttggcctggagaactgggctgccatgagattattcttaatttacagttgcctttgggatattgagggtagatacaggtctaccacgggactaggttcactccaacaaaatttctatccaaaaccgctcttctagttccatgttcatgcgaaccagagactagcttggattttctggagagggtgggaagaattttccaaagtgaacgtgattcaggatgactatacctcacactcagattagtaaaatttccttcttcttgccttttctgtcttccacatcgattgactgcaaactgtcctgcacatcgctggcaaaatagttttctatgcttgccaattcgaccctgtcttttcgttgcccacagcctccccatggctcttcattgccatggcaaccacatgtcctggatttttcaggacattttttatttcaaatattctgtcatgtggtcaaaccatgtgtcagatcatatgccaaaagatatgttctgatttgggttttgaaaatatggtcactatacccattgctcccaagatatgaccgttgtttgcccttcccttgtctagtttactaaagcagacatagagtttcccttttaatataataatatctttaacttggaaatacataatattttgcagagtactttcacatgatcaattcaatggatcctttcctacctgtggggtaggcaacgtaggagacatttccattttacagatgagaaaattggggcacagagtggttaattgactttctatcattcccagagtggcaaaatgattgaaattccagccttctgactctaatgtcttttttctccaacatacggcttccaaatataaatgtgatgctttatactctaggtttgtttgccacttacatccctgaaaggctgtctttcaggggaccatttgactgtaggagaccaactctttcttgatatatgcttcacatcagctcatgatgttgaacaacagttgaggggaaaggcttgaaggtagaagaactgggggactgagatgctaataatcaacatcatacataatttaaaagaaagagagagaaagaaggaggaggagggggagaaggggagaaggaaaaggaaaaagaaaataaaaaagaaaagagttttagagaatctgctcaacagttacaccagtgatatttccgaaagtcaggcttatttagcacatgtctgcaatgtttgtaaatatctgcttcttaatgttattagttctcaaaaatagtatcattgtgttaaattcttccatgttgtatggtgctagatgctatacgtgagaataaaaaagaggagaaaatgcgtattactagcctagttattcatttatgtattcaataattaatttgacagatatcaagcaccaactttgtgccaggtgctatactagacactacagatacagtggtgacgtctcagagcttatagcccggtgataattattgattgtaataagggctacaaagaagataaacaggagtatgtgataaagagaactgcaggaagctagggaggtgctagggagagcgacttcagatagagtggccagggaaagcttctctgcgaaggtgttgtttaaactgacactggaaggatgataaggagccagagacgtgcacagagctggggaaagagcatttcagaaacaggaagcaagaagcacgaagccctgtgcttgttactctatgtgcctattgcatagtgaccaagctgtcggggcgtgggagaaaggtatgaggtgaggctacagagttttactggccttgaagatcatggtaaggggttgaggttatattcttttttcttccccgcaaaagacaccattgttccaatttgttattcagtatagtcagagttagtaatcatgagagcagcaggcgtagctaatgtttattcctttgtgtactaagtgccagctattgcagatgcattatcacattcaatctgcacaataaataataatagtaataataattattattatttttgagacagtcttgctctgttgcccaggttggagttggagtgcagtggtacgatctcagctcactgcaacctccacctcccgggctcaagcgatccttgtgcctcagcctcctgagtagctgagattacaggcatgcaccaccatgtctggctgaatttttttttttttttttttggtagagatagggtttcgccatgttggccaggctggtcttgaactcctgacctcaagtgatctacccgcctcagcctcccaaagtgttgggattataggtgtgagccactgtgcccagccacagtaagattattattattatccccattttaaaggtggagaagccgaggctttgagaggatgagtagctagtgaaggtcacatagctaggaagtagggggccagaattccaacccaggcctagtctgacattagggctagtgtgtatttttgttctgtttagtttttttcagtgaacctaaaaggactatttcatactgtttttgttgattaggaattaaattgttttgtatgaaatatcatttgaaattcctcaataacatctggggctcagaaatatcttttttgtatatatttaaggtgcacaatatgattttttgatacttagcttgatatacatatatgtagtgagtgaagtggttactacagtcaagcaaattaacatacctattgtcttatatacttacctgtgtgtgtgtgtgtctgtgtgtgtgtgtgtgtgtgtgtgtgtgtgtgcgcgtgtggtaagagtacctaaaatttactcttttggcaaattaccaggatacaatatgatattacaaactagagtcctcatgttgtgcaattacgaactagagtcttcacgttgtgcaaacagatctctagacttattaatgctacattactgcaactttgtaccttttgatctacatcttcttatttcctcctgtgctccccacaaatcctgttttcactgtttttatgtatttgtttttttttttaaactagaagacattatgctaaggaaataggccagacacagaaagaaaaatactagttgggactaaattctaagaacaatacaaagtcacagaagccattgaagagagagacttttagataagattcttttaggaaaaacctgcaatattgctcctgaacccgattcttatcccaaaggccagagactacagaagcaatgctatcggtagaatattgaattcccaggagctatttgtgcaacattataaagctctttaccctctaaaaatgttaagagcagaatgtttatgatagatttcaaaatgtaggtgagccactcattcattagcacctctgatatgccaggttctacatgatctaggcttcttaactcaagatcaatactatccagtcatgggaatgtaaccaaagctaatttgggaggagaggacatgaaaatagaaataagcaggcagattgtttctggctagacagggatggagaggatttgttattaagcagagatgggtttacattctaattgatgttggtgtcttcagtcttaacgttttgccagaaaatgaacgggaggcggcagtggtaggtgacagaagcttttctgcataacagtttaccatggaatccactcaccaggctgggatttaaatttggctgtaactctcgtcagggcagaatatgagtggtgtgtgcttctttctattgtggtccatggttatgtctgcataataactattgcaaagaaaggtgaaaacttttggttaattatcagatgctttgcaatggtcagacataatgcataatacatgtctcatggatttcagtttttagttggatgtgttggcattaaagtgagtgtttgctaaggatgggcacagatgaacatgtgaccctcaaaggaagctggcttaatgcattgttgcataataaagccaggagtctctctctatatatacatgtgtgtatgtatatacgtgtgtgtgtgtgtgtgtatttttaatcaaatgttatggttctcattctatatgctttatttgttaggaataaagcatcaaaacagttttagaaaaggagcgattgttggatgatttatatttaatttgctacactgttggagagaaaaagattaaaagcaaattccagctcaaaatcatagcttctttcagtcttgaaggtatatatatatatcttcatatacatacacacatacatatatacatatatatatatacacacacacatacatatttatgtatgtttttagagacggggtctcactatttgcctagattagtgtcaaactcctggagtcaaactcactgggaggacgtaagccattctccctctcagtctcctcaagtatctgtctggaaaggtatatttttaagagcagacatacagctaacccaaacataccacagcaggtcaagaatccctattcaagagggtttcctaatggaaaaagtcagagaactagttcatttgagtaaatgtagcttatttttatgctatttccagaataatcaccttaaatctattttaatagtctcacaacaatgcaaagattccatgttacaaagtaagccttagaattctaaacctgtaatgtcaggtaggccctaagatttattcatgcagcaatgataggctaaatatctaattactcatttgttaaaacacacagagcaaaaatagattttcttttaaaagcattggttttcccattttgctctttggatttgagtctttcagattacataacatggggcaaatgcttaaaagctaaaacatacataagctacttcatactatattttattgctttttaatttatttaacttaaaaattaagttctatagtgcagttaatataagaaaaagtataaatttttttaaaagaggcatagctatattctccagctgttggtctgtaccgttaaattaccagtttttaaaattaaaaaaaaaaacagttaaaaatatttgttaaataggtgactgggccagatgcggtggctcatgcctataatcccagcactctggaaggccgaagtgggaggattacctgagctcaggagttcgagaccagcctaggcaacatagcaagacctcatctcttaaaaagaaaaaattagctagcatacttgtgtgcacctgtagtcccagctactgggaggctgaggtggaagcatcacttgagcccaggattttgagactgcagcaagctgattgtgccagtgcacttcagcctaggcaacagagcaccaccctgtctcgaaaaaaaaaaatttaatgggtgactgaagttttctctctacattcattaataaatagctttcagtgcccactgtgtgccaggcacagggccaggatctagggatacagcaaggagagcaacccactttatttttggatggggtttaaaggtgtggacgtgggataggagacaaacgagaaaggaaaaagggctttagagcagccagttttgacaggtattcctgccagtgaccttatgcatccagtaactaagcatgaacattcttcttattggtagttgtgaccctctgatactaaagagatttcccccaagttgtcttattacatgtcccacaatagatgacattcacagccttcacatacttcatcactgaactcacaactagcagtaggctcctcttttattttccatgaactgattttaattcggagaatattgtagttttttttttttctgtcccaacgttttggcacgtttgtgtattcctcagagtacagcttcctatgagaacaccctaagcttgaatgctttggggcagatgtgggcgatggtgagaggggaaataggacgggagggcttgaaatctttttggaatgtaacttctctccatgaatgcatttgcatccactagtctacattcccttgaatctgttctatttctgccatttagtgtaagcatcacagaagatgctggctgccaccgcgggagaacagagagttttggtgactcagaaaataaccatatggcattcaagcttctttatgttgcccaaagagagctcacaataatctgatcatggagttcgtgcactgagagaaacacctctaccactgtgaagcagatttaaagttgcatttgttttctttgtctcctatccaaatgagtatgacagagtttcttttaagaaaatttgcaactcttccattttgggtgtgtcctctgccaaatgttttggagaccttaaagcagggtgcctgggtagggttgctggataaaatactggatgttcagttaaatttgaatttcagataaacaacaaataattttttagtataaatatgtctcatgcaatgcttgggatatgctcatactaaaaaaattatttgtgccatcttacatttttatttgccatatctggcaatgttatgcctgagcaataggcaccagagtattcatattgtggtatctatagatagagtattcatattgtggtatgcatagatagatcagattatgatttttatttatttatttattttgagacaaggtcttattctgtctcccacgctaaagtgcaagggtgcaatcttggctcgctgctaacctctgcctcccaacctttagcagtcctcccacctcagcctcccgagtagctgggaccataggtgtgtgccacaacactgggctaagttttgtgggttttttttcagtttagtttgatttttgtttttgtttttctttttgggtagagatggagtttcaccatattgcccaggctggtctcaaactcctgggctcaagtgatcctcctgcctcggcctcctaaagtgctggggttacaggcgtgaggcacaaaacctggcccagattatgattttatggcactgttgacagcacagttttggagccttccatagcagcaccacaaacattgtctgtcaagtgtctacatgctcatcagagttgtgctggctgccatgccgagttaaagtggacttggtcctttcaatctagaaagacaacaagaacaggacaatatcaacagtgagagaccagataaaaagaaaaggaaacatgaaaaatttgacatacatcaaaggagtatgtacaacaaataaagtgcatctattatgtggacaactcattgttgggaactgacacgagaccataaacatttcacagaagtcactgggcaactgttcatatcttctgtttggagacaaaacaatatctcaggagcaaaagaatctctacttcctttaactcccagaattgcaccaattccagaatcgcaccaattccagaatcacctcaacatctcatctctgcaagacatttcatgggatgataaaattatatgtatatataaaaaggcatatgcacatatgtaatttacacacatatatatcattaagggaaaatgtagccattgatacaatcagaaaattctcacatatttatgcataatctctcggatcaatttgccatcagtaatgaattggattgtaaatgtattcagatcaatggtgcagtggccgctttgatcactaagatgatggaaatgacccagtttattgtgccacaacctagtcttatggtgagtactcacttggcaaccagcttatcaaactttagaatttcattttaaatgattggtccagaatgcccataggtaggattggcgtagcctgagagattgtcaggttatctgtgcatattttcatatttttttcttattacaaaagttatacataaccattatagagagtttaagaaaaataagataataagaaaaaaaaagcttatgccaggcatggtggctcatgcctgtaatcccagcactttgggaggccaaggcaggcatatcacttgaggtcaggagttcgagaccagcctgaccaacatggtgaaaccctgtctctattaaaaatacaaaaaaattagccagtcatggtggctcatgcctgtaatctcagcgacccgggaggctgaggcaggagaatcgcttgaacccaggagacagaggtttcagtgagctgagatcgcgccactgcactccagcctgggcgacacagtgagacttggtctcaaaaacaaacacacacacacgcatacacacacacacacagaaaaaaaaaaaaaagcaaccataatctcaggtctctgaattcctctttaaaatgactaatagtgacacatttcaaataaccccaaaagaataggaatctgtcacatttctatccatcaccaatacatttatcattattattattattattattacttggtttatatttctaattttaaaagaattttctatattttgaaggaataaaatataacagatactgctaaaaacccatcttttttctttccttcccttgccaggagcaaccactgccttgaaattattgtgtgtcattcccatgaatgcttttgtccttttacaatctatgtatgggtacataaattattgttttgtgtatttagaaaaagaagaacactgcacatattcattggaattcatttttttcacttgcttcatattttgtagattaatttatgttaatacatgtagacgtaatgcatttacttaaactgctgtaaagtatcccactgaatgaatatgtctattcctacaatgagggacagttagaatgtttgcatggttttctttgatacagtgtagcaatgggtgcttccaagtacacatattcaatatatatatatatatattttaaatagagacaaggtcttgctgtgttggccagactggtctccaactcctggcctcaagtgatcctcctgcttcagcctccaaagtgctgagattacaggagtgagccacaatgccaggcctcaagaattttttagggaggacatctaaatgtatactttcttgtaaaatatgaaaaccttcagtttttctaagttttgaaattgcttttcagagtgagagcaccaatttacacttccactagaaatgtaaaatagttaattgacccacatttttaaaaacactttgtattgtcagacattaatgtttgccaatctgatgatggtgaaatagtatctcattgatttatcttgtatttccctaattgttactgaagttgaggatatttttcgtatgtttatttaccattcaaatttcttgttctatcaattcgttattcataatagataataaatatctactcatatctatcttttacaaattttaaagcaaaagttatgaataacttttcacaatatctatctatcataatcccagctacttaggaggctgaggcaggagaatcacttgaacctgggaggcagaggttgcaatgagacaagatcatgccactgcactccagcctgggtgactgagcaagactctgtctcaaaaaaaaaaaaaaatgggaaatatcaaaagttaagaaatgttgagaagaaaatgagaaggtctaacattcatctacctgcacttcattctaagcattctctcagatttattttatagccgaatgatcctcactttatctagatctaatattttaacttatttatttatttatttttgagacaaagtctcactctgttgccaggctggagtacagtggcgcgatcttggctcactgcaacctccgcctccttggttcaagagattcttgtgcctcagcctcccgagtagctaggattacagccgactgccaccccgcctggctaatttttgtatttttagtagaaacgggggtttcaccatgttggccaggctggtcttgaactcctgacctcaggtaatccacccacctcagcctcccaaagtgttgggattacaggcgtgagccaccgcgcctggcctgatttttttaaacaaatgaaaattttgtttctggaagttttatttatttttttctcaactcggtctatacttttttttttttaataccgtatcttgtttttgtgattttaattccttctttatatgatttataacatacttaggggctgggcatagtagctcatgcctgtaatcccagcaccttggaggctgaaacaggaggatcacttgaggccaggagtttgagaccagcctgggcaacatggtgagaactcatctctacagaatatttaaaaaatagccagtcgtggtggcacgtgcctgtgatcccagctactcacaagactgaagtaggaggatcacctgagtccaggaagtcgagagtgcagtgagccatggtcatgctactgcactctagcctgggtgacagtgagacactgtctcaaaacaataaataaaataagatatacttatatcatggtcacttgcattatctgaatttcttggggctcaattattgtggattttaaaaaaattatgtctgcctgacttgtttatgtaggattatttatgatatgctttgacaatgactgcatctccaatgggaatttatctgtgggaaacctctggggcctgggttgaggtatgtccctctgatgcaggtgccaggcacctgagtggtatcaccagatcattgaaggccatctcaaaggttagctaccactggcatggaaccactttttcttttcctttagagatggggtctcactctttcacccaggttagagtgcagtggaaattcacaagcacaatcatagattactgcagcctcgaactcttgggctcaagtgacccttcacctcagcctcctgagtagttgggactacaagcacatgccgctatgctcagctggaaccactttttatgttggttgctacatttatgggctcccctgaccttgtagtataaattccagagggggttattttctcacctaaagctgtggaagattcagataaatttcttgggggccaggcatggtggctcatgcctgtgatcccagcactttgggaggccgaggcaggagaattgtttcagcccaggagttagtgaggcctcgtctgtacaaaaatttaacaaattagccaggtgtggtggggcacctatagtgccagctctcaggaagctgaggtgggaggattgcttgagcctaggagatccaggctgcggttgagctatgattgtgccactgcactccagcctgggtgacagtgagactctgtcttaatctttgtggttccccgctcccagaaaaatctagatacatttctttatcatctctcagtagcattgggtagacttttttttcccccagtccttcccttcactgaaggtcacagtcctggttttatgccaggatcttagcttcaattccacactttatgctagctcaaagtcttgtcttctgtttctaactgagcatcagaactcaagtttctgtgttacaaaggcctatactctctttttctttcttagatgcttatctattaaaaatatttgtatgtttatctagtttttctaggtgtttataggaggaggaattgcaggttatctagttttccatcttaacagcacttgtctttgctcctgttacgctttcaagaaacaggagtcaagttatcccttgtgcctgagctgctttgtgtatctgctatccctccagcaggaaacaggcaaatgcctgggcaaagcaaagcttgaaaatggtaaaattcatctttagcgccttctcatccagagctttctctcctacctctccagtcctctggagcatcttgtttgtccttcctcattgaaccctgcccttccaggatgctccatagcccttccaggacttgtcatttgctgtgcttttccctctgctttttgtggaaatatgcctcaccagtatctctgcactgtccaaagtgtccaggtgacaattagctaatctgataagctcattcatgctaatgtgctaatgaaagaggactacagaagatggctgtccttcccctacctcctaatcaggggctcttcttctcctgccaggtaacatatgtgcatagcagcagtgagcttctagagaccgcgacccggctttagtggtctaacctggaggattgacgttaatggaatgagatttttaagtcaagtaggaggaacagccaagttgaggcaggcagaagagggttagaatcaggcaaaaatgaccctcagatcatttgtgagtgcctacgaagtagaggttgcattaaccctttcatttctaaaatgtaaagaatagagagtatttcttggaacgtctctttgctgcatcaaaattattcttatcggaaatccccctacaaagcaagaaccagaactaagcagaaccgataatagattgggtacatgactacacattctgatattttcattttgctgattccatgggataagtctacaccccttttaggggatgggcaagaaagagatgggtccttaaattggaggctagaacatgttcgttttagacaaaatagagaaggagtggtaactgtttgtctcaccttctttctgggtctcattctattgcatcccaatctcagaagagttagggtgtcagctcttagaaggtggtatagaggtgagacaggctcatgcggagcttcagtgggactgattgtgcctttgagcctcagagagaaagccacatcttgtaagaaagagtatacaggtatatgcatatttattttattgtttccctattttcacaaaacaaatgttttggtctagttgttactaactatgctatgtggtctaatgagagggtagactttgataactgtgtatttgttacagctaattgataaatgtaactgccttgaagacatcttattacggggatccccaatgccagggccacggatggtgccagtctgtggcctgttaggacctgggccgcacagcaggaggtgagcggtgctgggcaagcgagcattaccgcctgagctccccttcctgtcagatcagtggtggcattacattcttacagaagcgcaaaccctattgtgagctgcccatgtgagggatctaggttgcatgctccttatgagactctaactaatgcctgatgatgtgatgtggaacagtttcatcccaaaaccactttccccaccctcaggtccgtggaaaaattttcttccatgaaacctctctctggtgccaaaaaggttggggaccacagccttattagatagaatactgtggctggcatcttccttttgcaccttctctatccactctctatgttcccctgccttctctctcctctggaggctgacctatatgaatcgtatcaataggttctcttgccatttgacctctggttgggtttggccgatggggcatactggtaggaggctggagagcaggatgagagtggtgcgttgatattccgggttcccttcttacaggtttgttacaggctggcttttcctcccttacctcctctagaagcccctctccacacagccttcctttctttggcttctgctctctgctctttccttcctagccctgaacacctttctctctttgtggtttccttatgctctgcccaaacctttgtaaagagttcctttatgaaactcctcaaattgtcctaatttgagtgtgccatctgtttcccactgggaagctgactgataaaactcctgaattcttctttttatttttattttttttcttaaagtaaaaggtgtttttttgttttgttttgtttttctgtttttgtttttgtttttttttttgagatggagtttcactgctgttgcccaggctggagtgcagtggtgcgatgtccactcactgcaacccacacctcccgggttcaagcaattttcctaccttagcctcctgagtagttgagattactggtgtatgccaccacacctggctaatttttggggttttagtagagacagggtttcaccatgttagccaggctggtctcaaactcctgaactcaggtgatccaccggcctggcttcccaaagtgccaggattacaggcttgaaccaccacgcctggccaagtaaaaggttttttaaaaaattgtgataaaatatacataacataaaatttaccattttgaccattttcagatgtacagtttagtggcattaagtacattcacaaaacttaatggagatggatggtggtgatggtataaccattagtaactttttttttttttttttttgagacggagtcttgctctatcgcccaggctggagtgcagtggcgcgatctccgctgactgcaaactccgccttccgggttcacgccattctcctgccttagccttagcctcccgagtagctggaacttcaggcatgtgctaccacgcccagctaattttttgtattttagtagagacggggtttcactatgttgaccaggatggtctcaatctcctgaccttgtgatccgcctgcctcggcctcccaaagtgctgggattacaggcatgggccaccgcacccagccaatgtcttgattctttagtggtaagaaatcattacttccttagaagtaataatctagtttcttcctgagggaattttatggagcaaagccaaatattgaccaataataccttcaaatgatatcagctgtgcaattgttgtaatattgaagagcgtactctaatcttgatagtccttgagagggcctttaaaaatattgtgaaagatctctttcttgcattcacagccatttatgaatattggtgtaaagactgaagagtccagaagtgtcttgcccaggatcctctgaacatgactcgattcctgagctagatggtcatgggaataataaatatcacttttgtcatgtgatggagactgaaagcattttgaggattgtattctaatgaacttagactgaccatatgctttatggaattactgagcagaacaaggacataactcccaatgtcctgaagaatatttgttctgtcttgagtttgagtttcccgttatatgtattttactaatgctgtgggcaaaggtgttgagtcagaggatgttctggttattgatttttgcaaaactaactgtcccaaaattgagtggcttgtttatttatttattttagggtcagggtcctgctgcctcactcaggttggaatgcagtggcatgaccatagctaactgcagcctccaaccccagggctcaagccatcttcatgcctcaacctcctgagtagctgatcctgagtagctgaggctacaggtgtgtgtcaccatgcctggcgaatttttaagtttttgtagagacagggtctcactttattgctcaggctggtctcaaacttctggcttcaagctgtactcccaccttggcctcccaaagtgctggaattacaggcatgagccactgcacctggccaatttcacggcttaaaaccaatttgttattatccttcagtgactgtgctggctgggcttagctgtattgttctagcttgggaactcttatgaggctgcagtcaaatggtggccagggctgaagtcatctgaaggcttcactcctatatctgccatctgggctgggagatggttagaacagctgagagcagatgaggtatccatctcgtcatgccacctttccactggctagattgagctgcttcatggcatggcagcctcaggggtgtcagactccttactgctggcttcccctagagcaaggggtacaaggggtcctaggcagaaactgcaagacttcctatgacctagcctcagaaggcccagaacatcactttagtcacatcgtattgctgaagcatgtcactaaggtcaggccagattcaaggggagaagtagcaaaaaatttgtgttcacctttaatctatcccaaggaacatgttttttgtttgtttgttttttgacagagtctcattctgtcacccaggctggagagcagtggtgtgatcttggcttactgcaacctccacctactaggttcaagcgattctcatgcctcagcctcctgagtagctgggattacaggcatgcaccaccacacctggctaatttttgtttttcagttgagacagggttttgccatgttgcccaggctggttggtcttgcacacctgatctcaagtgatctgcctgccttggcctcccaaagtactgggattacaggcatgagccaccatgcccagcctggaacatgggtcttaatctcaattttgcagctcccaaactctgggaacttaggcttgtccattacctgctctttctgagaattattagtttattaaattattaatagtttcctcatctgtacaattgcaaacattccatggatgatcttaaagactctttcacttcaaaattatgagttctctgccttcaaaggacacagaacatttgcaatagaagcttttcttgaaatttctttggagtagatatcttatagttttagtgtctaccatctttttattctatataaatagaaaacttgagtcagccaaaagataccaacacaagatttcattatgaattttccatacttcttggcgctagccaaatggtttacaaaatggcaatgttgaacagaagacagatttctgaaatgcaaggcgcaatgccctaattgcgttgtagattccagttggaaacactagttctctaaacaatggtggctcatgttggtgccttttcggaaattcagtgctcatcaaaagctgttatctagttttaggtgaagcagggacagtgagaaatataattaaggaaactgtttgaacttgttagatagagcatacttgtctttgggaccctccattttgtttgttatgtttgtttcagggtagggtaaaggtctctcagcatatgaattccagcaataagactgatgcttcacttttcattgacgctaaaattgctcttctaaatagaggccctcctcaggtttctaggtaaagcccttggccaattgtataccaattacaccttagagttgaatttcatggctcacactgcccagattttgaaagccagaatctcaggggtgtaaatattaaaaaaacaaaatacatatagaacacaaaacaagaagtttacaagtctgctgaaaaacttccgtccagacgagcccattttctgccctacttcttccaaaataaaccactgtgacaagtgatattgaaatataaaaatattgaaaattctctgagcagatcctgctggttgcctatccaacagcttctcttcctttcttccttgcttatggaacgctgatcttgctccagaatttacaccattccaaatttagggcaaatactgatagtgtaaatcatgatcccgttggcagtcattagtttaggggtgagtatgtgacccaaatctgaccaataagatataaagggagatctgcttgagggttctgcaaaacgtaatttctttctcaaaatggcacacaagaaaagacatttattttttgtccagtgaatgttgtgtcagaatataattcccagactgtggttactacagtcatcttgtaaccacgaaagtcctgtcctgcagtccaagccaacacacggaacatgacagagcagaaaggtgaaatgaatctgggtccttgacgatgttattgagtggagaatttgaccagctgcagcgccacctacctctgaacttctcatcctgtgccacaggaattgtccccattgtttaggccagcctaatccgagacctctactacctgaagcttaaaatatcttaatgtatccctttctcatgcatggcaaggaaatattggcatacctaacatccccacttcacctgtgcttggggctgatgctgctgtttcctgagatctgaaaaaataaaaataggtagtgatacaactcgacgggattgtatccagggttgttgaagcatggctgtatcctgacatagccctaatccctgaggggagagtgatattgatgataaaattatagccgacactttctgagtgttctctctatacacggatactgttttaagtactttatatgtgtaagtcatttcatccacaaagaactctatgagattggtgctgccattattctcccttacacatgaggaaaatgaggcacagagaggtgaaggaatatgcccaaggctgcatcttttataagtgttcaagaacctactatctcagtcattgcgctctttggcctttccactcctgaaggccaaagggacacccctttactatcagcagtccagggggaagcagccagtttttcctattttctggtttctctctctctttctttattccttccttccttcctttttctttctttcttctttctttctgtttctcgcttgctttctgtctctctccccttccttccttccctccttccttccttcgtctttctttctttcttctttctttcttctttctttgtctttccttctttctttcttctttctttgtctttccttcttctttctttctttttctttctttcttctttctttgtctttccttctttttctttctttcttccttccttccttttctttctttctttttctttttctttcttttttcttttcttttcttttcttttcttgtcttgtcttttcttttctttcttttttttggcggagtctcactctgttgcccaggctggagtgcagaagtgcaatctaagctcactgcaaactccaccaactggattcaagcaattctcatgcctcagcctcccaagtagctgggattacaagtgcccatcaccaggcccagctaatttttgtacttttagtaaagactgagtttcgccatgttggccaggttggtcttgaacttggtgatctgcttgccttggcctcccaaagtcctaggattacaggtataagccactgtgcccaccctagtttttcctattttcaagggagctttgtgaataacctcagctggtttcacatatgcattgttatttggggtcattcattcattcatcaagcatgtattcaacacaaactatgctgtaggccttgagtatttgtttgtatatttttgagacaaggtcttgctctgtcacccaggctggagtgcagtggcatgatcatggctcactgcagccatgacctcctgggcataagtgatcctcccacttcagcctcccaagtagctaggatcacaggcataccacaaccacacctggctaatattctcctgtgttgcccagggtggtcttgaactcctgggctcaagtgatcctcctgcctcggcctcccaatatgctaagattacagagattacaggcatgaaccaccatgcctggcttgaaacttttgatttttttttttttttttgtaaagatgggctttcaccatgttcctcaggctggtcttgaactcctgagctagctcaagcaatccacctgcctgttgggattacaggcgtctgacaccacacccagccagccttgagtatttaaagatgaagaaaacctagtttctatcctcaagcaacttaatctagtgggggtgggaaagatcgttaattaaacattgaaagagagagcaccctcaatgctttagctggctaaagtagtagctagcctttgagtatggaggatgtgttagtgagttttgaggatgtaacatgtagtaactattgaatgatcacacattccctattttcctgataaggttactaaggaagagttcagtccaacatcccacagccggtcagtggcggaggttgaacctaagcaaccttgctggtgctggaaaccactgtgctgggtgtatatatcctggtgggagctgaggagcaactgcttccagctggacagggcggttgcacaaaagggctctggcatgcttcatagatgaagtgatttttaaactaaacctggaagagtaaatgtaatgcaggtaccatgaaagggaaaccaattgagaattaaaagaaaaaaagataatggaagaaagggcattccagataggaaaaaagcagcatgtgcaaaggtaggaaggcttcagggagccatggaatactcacggaatggtaagttttggggggcttccacgtggtgtgtgaaggatggaatgatgggagatgcagggggtggaaggcccttttgtatatatgaggagtctacattttattttgtaaacaatagggggcacactgaaaatgttaagggcagagagagacaagagcttcttttacagtgatttaaatgaaaagtaaggaacaggagccttgggactttaagatgtctaatattgacagatgagtgggggaggtcagagtggagggacagtgtaggtgaacactttggaagtaagtagacctatttgggggctgttgctgttatctgatgaccatccagcctaggactcaagaatgatttttagatttttaaaaggttattaaacaaagaaaaaaagcatagaaaaatatgcagcagaataagacagaatatgtggcctgcaaaacctaaaatacagaagaacaaacattgtttgttcaatgttgttttgttataatgttaatgagaaaaaaatcagttctagccagggccactgtgtggagtttgcacgttctccccagtctgcatggattttccctgggtactctcatttcctctcatgtcccaaggatgtgcctggtgggtgaatttgaagtggcgtgtctagatggtcccagtctgagtgagtgtgtgtgagtgtgtcctgcagtgggatggtgccctgttcagggctggttcctgccttgcaccctgagttgctgggagaggctcccaccacctgccaccgtaaactggaataaatgggtaaataattatttcatttgtttttattaatctttcttaaatgtatgtataactcacatttatttcagtatttaatattaaaagtgttttaggctgggcatggtggctcacgcctgtaatcccagccctttgggaggccaaggctagtggatcacttgaggtcaggagttcgagaccagcctggccaacatggtgaaaccccgtctctatgaaacatacaaaaaattagctgggcatggtggttcctgcttgtaatcccagctactcaggaggctgaggcaggagaatcacttgaacctcagaggctgagatcgcatcactgcactccagcctgggtgacagagcgagactccaactcaaaaaaaaagaagagtttggtctttagttagaagtttggggacgtttttgtgactggaaatatgctgtagaaacttaactcttgtttatatcaattagcccatggtaaagtggttgcagtttcctggaacttatcaatgaagtgaagtgagaacttactgtatttatcatctgtccctttacagaaaatgtgctaagttaaagctggtggtgccctgcaagtgggaaggggaggaaggggaggaagaggaggccggtcctccttaaagcccttaggaatcctggccagaaagagctggggaatgagagtggatgttaaggctgaatcaaggaattctggtttggacaactgcgttttcagaagtatcatcaccaacatacaaaatacagcagggaagatctggacaggggcaggaaagtagagagattcactgatttgggacctgacgctatgaagtgtccacaagacatccaggtcaagatggttgggagatacgctacactgagcaatcttctgtgtctgctcccctgtgatctaaaatataaattccttaagggcaaagattatacaactctttcatatagaccctggtacataataggctctggatcaagtgtgttgagcttactgaactctagacagttgaatttaggagactcagtgagatctaggttggagaaagagtcttatgtcattggcttgtaggtggtaactaaagtgtggaggtttatggcatatttaatatacacttagtgcaatgtgaagttgcgtcttgacatgatttgtttggctgtccaattaaaagcaagtccctcctgagtcagcatgtatcacttttgattctatttgcagagaggcaggagagcacagcggttaggagccagggcttgtggccaggcagcttgagtttgaaaacccacctcctctgcttcctaggtgtgaacaaatcattcaacttctttgtggcttagtaagtcatctataaaatggagataataataatacctgttagagagttgtgaagcttaataatacatgtatatgtttggaaagacctactatctgttcttcaaacagcagccagagttatccttttaaaaaataagtcagcagggtgcagtggctcatgcctgtaatcccagcactttgggaagctgagaaagatggatcactcgaggccaggagttcaagactagcccgggcaacatggaaagacccccatgtctacaaaaaaatacaaaaaattagccaggcatggtggcgtcagcctgtagtcacagctacctgggaggctaagggaggagaatcacttgagcccaggaagcagaggctacagtgagctgagattgcaccactgcactccagccggggcaacagagccagaccctgtctcaaacaaaaacaaaacaaaaaaaactaaaaactaaactaaactagggttgggcgtggtagctcacgcctgtaatcccagcattttgggaggctgaggtgggcggatcacttgatgccaggagtttgagaccagcctggccaacatggtgaaaccctgtctctaataaaaatataaaaattagctgggcgtggtagcaggtgcctgtaatcccagctacttgggaggctgaggcacaagaaatgcttgaacccaggaggcagaggttgcagtgagccgaaatcacgccactgtactccggcctgggtgacagagggagactctgtctcaaaaacaacaataacatcgacaacaaaactaaactaaaaaataagtcatatcatgtcaggccactgataaaaactctccaatggctcaggtaaagccaaagtcccatggcccaccgcaccttaccttcctgagctcatctccctctgttcaccttgctccagccactccagcctccttgctaccttctcaaactcactacagacactcctgcctcagggcctttgcactcactttccttctgcctggagcactcttctccaagatatcagcatgtctttcttccatctcctttgagcctccattcaaatgtcaccacccttttctgaacagcacacactctctctcctgaattccttctatgctattttaccagaagagttctcacatgctaattactacataacttatttcatttattatctgccttctcccactggaatgtaagcttcatgggaactgaaataccactgaatttttatgagtgatgcctactatatagtaagtactcaatccatgttagctgtggtggttcccaaaaatgtcttgtactacgttgttctaagtacagttgatgacacacagctacctctcactctgtacctcccccaccatcccagccccagcaacacagaggggagagtggtaagagcaggcatcaatgtctgttccctgactccctccatccataagccccgagagggtctccacttcaccagtcttgtacagccatttttgttaaatgcagggatttggaaaaataggcaaaatagacaaatgcttcaggagagtacaaaacccatttgtagtctttcagaactggtttaacaacccaaagaagaaaatttgtgtatacacagtattgctgttctcttgatattaaattagtattaaaatgggatggaaactgctcttctattgggctcctatggagacggacaaagcaatttaagagaaaaagcagctgccctcagcagtaggctcagaaatgtcaattttaattaaaacatttattttcaaatacatttcatggttcatatgtagtgatatgtgcctacttcatgcaaatattcaaactgctgggctgaggaaattgaagaaaggcattttgataaagagcagtatgttcaaaacaaagagatgcaaagaaaagaaaatccacatcatgcttccatttttccttagtccacctgccacattgtttctcatggacttgcccactgatatgtaaaggccagggaactccactgtagaaatctggatgttagtgggtcatcgtgggcattggtaggacatcccttcactcttatgtgagtcctgctttgtgtacaattcctgtttacttcagtagaagaaccacccctcccccagtgtttccagatcagaagaaaacaaccaaaatagccaactcccaattcaaaattcttccaaactctgtctttccctgagtactattttaggtttgagtcattaaagctgcagagaggtgtccaaattttacgattaccttctgagctcacctctcctcttgctctctgccctgcagagctcacgcacctgccaaacttctgttgacttcccagggaaaccggtcatgacttcaacatggccaaaaatcactgaaacaaaaatgtggccagcttaaataagtggtaatttaggctaagaatttctgaaaattttgctcaaatttctgtaaggatttttatgaatacattttgatttaccagaatttagcattggaatattattaataatacaatctgtacatgtgctatgctaaaaaaaaatcattgtcattaggttaaaatcaaagacaaccagcaatatttatcaatgtgatgtgtcttttatcttgtagtctgaggagtgtgtttctgattaaggtatattctaaaatttgagcaaattattacatataaatacagttgcatcgattgctgctctcaatatgcttttaacctcttcggaggagccattaacatcacagtcagaaacacatagtcaagtccagagaatgtatgcaggtatcgtaattggctgtgtatgccagtgctaagcacttttacaaattatcaaatgttccaatttataagttgtgagagtttgattttgtatttagtgatgttgatagtatacttccattttatttctgagctcattttaaaatgcttttgacttttgctctttgattttaaaagtatactaagttataatcaatactttattaaacccaagcattattccctccctagagttacaaacacacacacacatacacagacacatacacacatgcacacatagcattttgattaagagctctgataaaggaagggagaccctggcaactgtaatcttttggatggtgagaagggctatttgttccctgggctatctggtgacaacatacatatattctggcagagtgaactgagtggtgcatcaataccacagaaaagtacatggatcaagtttaagagaatcaacctgggatacttgacattcacaaatgaaaagaagacacttactaaatgttgaccatgttgaaccaggtggtcttctaagagttttacacctaatcctacccatattactttgagagaggtattatgatggttcccattttccagatgagaaaactatcacagaaaggttgagtaagttgcctcacatcatataactagtcaaagatttgaatccaggcaatctgcttttaaatactcatgtttaataaaaacataggatgtgtcattctacaacattcctttccatgagatggtgtttggttgctcatagcatagtggttaaaagggcaggctttcaagcccactgctaggttcaactgtgtgaccttgaacaagatacgtaacttctctgtgcctcagttttctgcttggtaaaatgggggtgacgtgaggattaaatgagttggtacacagcaagcatttatagaggctagttattgttgtgactagttctgctactatcaacctagtaagagagtagattaagagcacattgtacttacagaggccagtaaagcctaaggtattttttttggtatatacaccacagaatactatttagccatataaaagaatgaaattatgtcttttgcagaaacttcaatggaactggaggccattatatgaagtgaaataactcagaaacaaataccacatgttctcacttacaagtgggagctaaataatgtgtacgcatggacatagagagtgggataatagacaatggagactcagaaaggtcggagagtgggaggggagtgaaggatgggaaattacctaatgggtacaatgtacactattcaggtgacaattacactagaagctaagacttcacctatgcaacatatccatggaacaaaactgcacttgtaccctctaaatccaggaaaatagttttttttaacccaagatattttcacagcttttttttttttttttttttttttgaaacagagtcttgctctgtcacccaggctggagtgcagtggcgcaatctcagctcactgcaacctttgcttcctaggttcaagcgattctcatgcctcagcctccagaatagctgggattacaggtgcgtgccaccacgtctggctaatttttgtatttttagtagagacgggggtttcaccgtgttggccaggctggtctcaaactcccagcttcagctgatccacctgcctcggcctcccaaagtgccacagcatttttttttttcagtaataaaaaaattggaagatagttaaataatgtggcttatcctctttttataaaaggagagtagatgtttttcagcccctgatttttgtatatatctggcatccaagttgatgtaacctatcacttgctatgaacttcagccttcagatctctatttttttgttccttcacccacatttttgttagttctcttcctaacatctttggaaatccagtcagggttaagttcagcaaaaccatgtgtcgcaggagaaatggtaaaggatcaggttagcaggctgcccagatgaagcaataaatttatcaagaaaaaaactgcaaaaatcatgggtaatgtgcatagtatttgccctgataaagcgtctgacacaagcctgtggaaaagcaaacacgttatgtgctccatgttcatgtggttcagttaagcaaagaagagacaggatcttcagaaccaaaggatgtgaagaaatggagctttttttcatcacaattagccatcagggtggaagccagttattaccaatatagtagatagaatcattctctgcatcagtagaagtctttatgccctgtacaaggggcattgtgtactgtaaataattcaaccataatgcagccatggagagagagccatcatcagtaagaaggattcaacccagccagctactggcttgtattaaaagaagaaatataatgaattgggaagatgttgaaaattgtagatgtatttgcttacaatttttttttcattagtagaggataatttttgttttctgaagcatttgattgaattaaagtagctcttgtcattaaataatctttaaattaaccttcaaccatgtatcagcagctgtaagatagaaacaaatgcattatgtattactgttttggatattagttctgaaaaagccaactatcattctcaacatcaaagagcaccccttatcaaggacttggctgataggataaagcactggctatttaccttatgaccttggtcccaatccagatcatattgccaatgaaaggacgtttgtgatcccagccccacacagatagatggtagtccatatcaccaagaacacagattggcaaaactggcattttcctgcttaggagagacctaagacagaaaaaagtccagagccgtggaagtgaaaaagcatcccgctcatacgccatcctagagatggcagtcttctcaactggacgaggtggctcagaatagcaagctggggatgcgctccaacctggcttgcagataaagaaatctgttttcagagcttgcaactcgtccaagcctatttttcaagccaacacctcctctccaaattctcccctcccccatccctctccttccagaaacaaaaagcagaaggatctttaggttgccatttgtagaactaggttgatggctttaatctttttaaaggatgattgcaactgagctgatatgtttcagactttgcttttaaaaaggaagattaaaaatagttagatattacattctcagtatagttttttagattacagagttaacaatttattacaattatgcctgtagcatcacattctcaggaaggagatatactccatcaactgtagaaaaaactacactaggtagaaaacttttcactggctccatatgagtggtttaacattttaaaaatatatacttaaagtcattaataaaagataatgtagtttgtatttgacatttgcatttatttgataatagatactataaatatttcaatgtgtaatatcttatttcagacaatttctctttgcttctatacatttgaccatttttatttttcattctattagtttactaatttagtcattcctagtctttccaagaaacattttagtgattgtaaatagttaacatatattataattatacttatttgatattacaagaagggaggcttccaacatctggtcatacaccacatcctttatttccaaatagagctagagaacaatctctctttagctgtaagttaggatactcagccaggcaggcaatgtgaacttctatgatactgttattagaagcatttaagagcctattctacatatatgaatactaaataacagcagctattttaaaagtgaatgcacatctcctgagtggggaaaggggcattgctatgtgtttatgtttctactaaaggaaaacttccctcacccataagaattaaagatgactagtaccacccacataaggggaagtccatctattcttgttctatatacaatacaaagtgtgacagcattggagcttcagcctagctcaacttgctcagatggctcaggtggtgggcttgaaggaaactcaggttggggaggttgtcaggacacagaaaattacatggagctccaggcattccaatggtcttgtctgggaagcggatccgttgattttccatgaggctgtttgtccttggtgcctagcattcctgtaacatccattaggctaaattggcttctcttacatgcacagaggggagagcagatgaaaggatacaaatgcaacagacttttattgtcagcaaacaaaaaagggcacatatgtgccagtttataaattactgttttcattaaaaaggagttcaaaaatcaggttccacttatcattgttaaaaccttaaattttttttagctgtatgatttcattatatgaattacagaacagtaatagagtaatattactcttaagccagctcacttaaatttaagacattcaagacccaataatgcactaggttctttagttcaagttatgcaaataatatacattttttattcggcttcccaccaggttatacatgtattataaacacaacaaaggcccctttcttgtacaatatattactcagaagctggtgaaaaatagaagccaaaatattgtgaattacattcttttaatggtttggctttgtactactggctgacatattttaaatgctaaagagaagctgaactggaaagagagaaatgttgactcactgttctctactactgttgccattcatactgatgttcttcaatgtctaaatcagattattatctttgttttctttagagtggaactagtagatccagctttgctacatttggaaaatcagcagggggaatggtcatctcaaaaagacaaaaataaaagaagggactgaaacttaacataaattaccatggctgtccctgaactcagaactggagagaacctttttattcttttacacacagcttatgatggaaatcaatacggattatttcgcaagcattgtttcgtaaatatttagtatagttgcctaacgtaattcagacacttaaaaaatacagccgctgatgtactaattccagtcaggcattacagtttttaaaaagccaaaattaaaaaaattagaactactgaacatcttctgatgaaaacgatagtcacagactttgccccaaaatttatgcactaaatagtgagatggctctgtgctcttccgcagatttccacgtttccgtgtctgcccaatatagtcaactggtaactagatcaagtgaataaaataaagctaaaaacattatggatttttctaaaaagtgaacaggaacgtgcttctgtgtgtcctgaaatacacagattagtcccattataatctcatacttaagaaaaaaattcatttactaagggaacattacttgtttacactgggcaaattgaaaacaaaaataagaaaagtggaaaataagaaatgcagtcctttagcttcatgacgtaacatgagctttgtgggaacaagagagcattcctttatacttgtatgcaatctgagctcagtggctttgaaagctctgaagtcctccacaaaactctttcctcccttttttccctcttaaaaaaaaaaacacctcaactaatgtatataatctcatcagcatttctaacagaaattctcacctcaaatttcttcctgtgtgagagtagaaccagtctctggagtacttggcaaaacacccgagcctcttgtttaattcaacaagtgtgagttgtgcttctcctgaaagcatatagctctttatacacgacaaaaagagccacagtggatggcaagcaatcgtgttttaagatgatgcatcatctgtttggatgctgccagtcttcccctggatctgtagatggctcctttcttaacaaaatgtaggcacagaattgcatttactgtccacagtgatgatgtgaaagattaaaaaattgccctccatcagattgctattaagaaaaaaaagactgtgaggtcagaattatttcttaattgcatttcacacctggttaagatagtgtatacagctgcaaggagatgaaaagaatgattgatccttgaagagaataggtagagtaggcattggaaagcttgagagcaaggcacactggggtggagtgaaaagcagaaatcacttttggtagaattaatttcttgccagcatttgaaaaagaggaaagtggctctggaagcagccttcattctccaatgctgactgcaaatcccccaccaaaacagtctcactgtaaacagcagatattttagatgcaattagacttccatgtgccatgcacaacagctgggaagagtttgcaaagttttctcttaatttgagcggaatcctaaagaaataaaatatcctgacaacttttagtgttgtcttgtgactttaaaaaaaaatcagcctgtgaagtatcactgctctgttttagtctaatgctacttctatcttttatcctttttaattagaaggcaaattctcagaccgccaggcctaatccctacacagtggaacaaagcccagcaaagcctttgaacactgttcagccgggcagcacaaaccctagtaactgttggcagtaggggcaggactctgaccctcatctcagccattctcctgcagctcctgatgctccctgcccttcagaaccctatctgttgttcttctgtttagactgaaaagacaaaagaggagacaatgtgggaaacctagaggattggctaggtaggatgcagggagctagtgacggataggggcaagtaaatggagtttcacgggaatggacacagtggggagaattggatcaccagattaggtctttaggttcaagaaatttcttcatccctcactaaatcttttcatggacaatgccactttttaaacaattgttgcatttccaattactccaggagtgttcaaacaaatgccccaaaccctccatgaaaagtttgctcatattttaaactcgccagatgaaaatgaataaaacaaataccccccaaatcagtggcagacacttacatctccaaagtatttacgcttgtaataatatttgagtcaagagcataatttgagctcactcaagcaaaacatggaactagacagaaacgtgaattttcaaagctaatcggaacaatcatgaatcaaaaagccaaattccaagtatgcaaatatgaaaaaggattgtttgcatttcctactttggctaactgtgaattattgaacaatgaaacaacagatgctactaccatgttgcaaactcttccaaattgttcttagattgagctacgtatgtgtgggaattactgtctgatgccaggatgtttaagagttgtaatgggatttctgaaaaagataggcatcttctgttttttttgtttttgtttttgtttttagatatgtggaatagatatgtcaagaaaaaaagagaagaaaaaaaccctttattggaaatatttttaacagtctctcaattcttaaacacagcaggttttataaagccactttcagttttccttctaatgtctgcagaaaacccaacatatgtagtgaaatacttaacccaatcattagggttgtctttgtaaccaaatataaaatgtgttactgatctggttttgggtcattaagaggttaatttaaatcataggaaaggattcattcaggggtttagatgagtattgtccaataaatgtgtacattttatcaagttatcttaaattcaaagttagagctaacacttttaaggaagcttccattttaaaagctctcagtaaagacagatatcccaagttttatatttaaataaaatatgatttcaaaattattaaagtgtaagttttacatggatttctagcatttattttgagaacatatgcttatcttattaaagggacagcaattactgtaactacagtccatttctgtacaatttctattattcaaatgacaaaacccaatatcttcctccacattctccgtctttgtgctgaataagcaaatcttttctccaggtcaaaagtggtaaaataggtgaaatccacagagataatgaaatacaactatgggtaatataaaaaatgatgcagcattattggcagtcgtctctcagcctgcttttaggtttgtttttacctttgatcttatcaaaaaatatacaaaatatagctacttacatccatactctttaagtacatcttatgttcatcattttttcttttttatttaaataaaaactgtctgaaaaattaatacactagttatttcagggctctaagcagtgatcctaatttgcaaataaaaacacttaaattaaaaaaaaatactttttgtaaagacagaagccacttaaagaaattgtctgaatgtttgcacgtatttcactgtctaatgctccaatggaaatgatcaataaacatttgcataaaaaagaccaaattcattgcatgtgtgttttaataataattggaaatctttacctagtggaaaattatttcttgttgttctgcatgcacgtgccatcttttgcaagtaggcaattaaatccagcaggcaacgttctgtagtgatacttggggtagttctgaaagttctaaagattcagaggtagtcctgcaaatgcacataacccacagctaaacacagttcccataaatcaaacctggcatcacttctactattagggaatggcttttgtgtttgtttttgtcccccatcactatcatctacctactcaccttaatcatgtatatgaaataattttattagaattgaatagaagagattcttgatcagaggaatctaaagcttttgaagacagctttttcttttaagaaactaagacttgcgtgaaccatgacaatgcagcacacctagttatcaaacagggttgaatatactcattaaaacttactagaatgtgaacattaaaataactgctatatttcccgttttctctttcttaggatccatgcaacttaggtgtacataataggtttgagtcgattgggttgccaaaattaaaatattttttgtggaggttagttgttgttattgttactgtttcttctactgaataaagctttctttactaagaataaagccttagagagtttctgaagcttataatttaatgaccataaatactaagctcaatcaaaacaaatgctaaaaaaaaaaaaaaaggaaaagaaaagaaaagaaaaaaaaaaaagccagctcttaattctgtattctgatccatcagtgactgtataactatatcattaacgatgttctctaactggggaagtccctaccctagagtgtaagggatcaaagaaaacattcttttctgtctggtacacttagtagtcctgcctcccaacagtgggataaaaggaacttgctaaactgttgccattttgcaacatctgctataattcccctaaatccagatttgcctgacacagagaggcctgttcttacatcattgccatgtgacagtataacaccagtcacatcaagcttggggattgcagcttcaggctatgataatatgaagaaaacctttttgcctagggcaaaacacttgtaacaaagtattattcatctggccaatttaaatcttctctcaaaaaggtatccagaaacatatgcagtattcctttgtaaaaggctggagcagctcataggcaaatgacctgaaccaagagtacaaaacctaatgtcctgattaattactgctaagcagctctgatacacagaaaggagaatgctggtactaatccttaaccctgtcctacattctcaaaataggccaaacattgctgacagttacaaaaacaaacctgtccgggtttgttttttttttttttatagtagtacattatcactcaacgccctccaccttataaaacaaggatgcagttcatatcagtagacagatcagggaattaccagtccaggggacttcttgggacaagggcacaggctcacagaaagaaaatatctgaaggcacaaaaaaatctaacaacacacacaaactcaaacagaaatattgcaggtgttcttattttcagagatcagcttgcataagattgagcttttccaaaaattgttccttgagttgagcaacctcaacacagcaattctttgctgattaatgtggagcagacagactgtaatgcttaggattttcttaggatgagatgttcaaattccctttacctataaaaataaggggatactcatagttcactaaaaatatcagacattttataattccaaactatttgaattgtgaagctatattggcttcgatcactcaaattacaggtacttttatcaataaagcagacatctggagtttctttcacttttgctgagcaagaaatcaatggttaaaagaagaaagtcctatataaggaaaaaggaagttgcatatcttagcagatttttttcagtttttaaaacaatcagaaagtaactaaaatacagctcacgttactaccagttgtgacagttttatatcataggttaatcacattaaaatatacctctcttgggctttatgtgtgaaacctggcactcagatagcactaattcaaaataaataatgaaccttacctattttgaagactgcctttaatttgacattattttacaggcacactcccgcctcagttttccaagaaatagtgagaaacaggaagccaatcaaggtcaaaattctgaagggccagcctaactatcatagggtcattttccccaggtagctactaaaggagaggagacatattttcacctgaaatacactcattattaagtctaataccattttagattttgaagacttctgtgtgtaagcccattatttttagacacaaacattttcacacagcacagcaactcatccagtgtttaacagacagcataagaaatgaattttccacctgtccagataaaacaggatgccggaagcccaagacaatacaagaagctggttcaacgtagcagcctgagtgttgacagtctctgctgtttttcacagcatcatgtacttgtttctctttgtccaacttcttttccttcttttccctacccattttccctctctcccttcctcagctggtccccaagggatgcactttagtttctcaacaatcctcatcactaccctctccccacacccgactttctgaattggagtgactcaccttctcattagtggggttgtaactcttgagtcaagtcacctgggttcataacgtcttcacaattctgagcaacacctgctcccgggcatgacgacttttgatggcaattgtccctccctgaagcctgaagctccgactctattcaggggcagagtaaagaaccaaatagctgtttctcaggtttggacatcccacttgacaatcctgcagaagtgaaagagttgctttattatctgcaaagattgacacaatttagggggaactttctcctttctggtctgtggcaggttttcttttgcagatttaaaacagaaaagttaagaaggttgaaaatcactgcccttcctggaatttgaactgaatattattaggactggaaatactcaagcatttcctagtttccctttcactaatcagtctctctaaggcataggaagtacaatggagagcacatatattttggattagagagacacaggcaggcttaaaacctggctctcatttatcagctctacgatcctgagtgaattacttgacctctctgaaactcagtttcctcagctataaaatgggggcaagtaaggcctatttcaccccgttgttgggaggatcaaatgagataatgaatgtaaagcaacctctttaaccaaccacaacaatcctattaggcattataatctccatttcacagaacgggggaatggggaatgattcaggaaggttaaagcacatgccaaatgtgacagtcacattgtaggtgtttagtaaacggggtctattatattcatcaacccaagaagcatggattctcacctatctcaaaataaatcgttagcaagttggagggcctttgctctagtgggtgaaacagccaagcttcctttttaaatagctcctcggaggcctttccaggaaagcccaaagggaaaggttcttctcattttccaaaccctgacttcattgtaggcattactgaaatgttacctctttagtcaactcgacgacacttctagttaccatctccttttcccagagcaggatccagaactttgagaaatgtcaaatcatttgtcaaaggtcataggtattacttatgttggaaccagatttgtaaatctagatctctatgtccttgaagacaatgtttttcccaccccggctcatggctctcactcaccacccatctgctcagggcatggaaccatggttagatgttggaggaagaatggctaaaccttttcaaggggcatgctctgtggcaggttcttctgttagcccaacaaaaccatcacgttttctagaatgaagcctaaatagaaatgaatcttaagtaaaaagcagaaatcagggtcaaataactagatcaataaactgaaaagggcaatacagtggaaggcatttcaaggtgcaaaacaaaggagaggagagtcagatcaaattccaaatcatttccaggaggaatagggacctaacagtacaaacttttaattgtgtacatgctaaaaggtttagaaaaccaggttagtaataatggagatgtttctctcctgctgattcccactgttctttgtacctcactttcccctccaacccaaaccccacatcctctctggctcactagggattgtgaatgaaagacagaaaatgaatttaaagaatccacaagggtactctatatccttgccttcgcaccgaccctcaggtgattaaagaaatgtgcatatgaatcacctagtgatcctgttataatgcagattctggttaaataggtcttggggtgaggcctccattctgcttttctaactgggagcgcagatttcagataacatcactcagattcttcagcttttcttgaaatgtcagtgcagcccttagaattcaaggtatcctcgtggaagtggggccgtgaactctgaagtgttactccctcccagacctcagaggactctcagctggaggttctcgatggttagaacagaatctgcctaagtagaacaggcactcaagttagagcaggcaggcaactgattgtatagactctcacctcgaatcaaaaaaagacaggaaaagaaagggctgtaagagacctaactaacccaaatgataacctgtgaatacagaccagaccctgattgtcttaaaatcaaatttctttccagttgaacttaaaaggtgaacaattggctggcagtagggcctattggatagaagtcagggagacgggacggtgagtcatcaggaaaggcaaaactatactgatccagcacagaactgggctggagcaggggtcagtggggaccttctccttcttttcgtcggttagggtaacttttctggccctgataaagtgaaagagagtcaagtgggtgatttgtacaactggttaaggcttaaggacatgaattctgctggagggggccagaggaggggttgagccagcttcatgaatgctgcttctacccaccagggctgaaaactttggctgcagacaagagaagggcacagctcactttttctttggctttgtttcttgaaaacctgctaaatcccagcagctgcaccttatattgtcttatatcacccagtagcagattcaggttgaggctgaggttgagaatatgatcaacaaccccaggatttggggccgggcacgatggctcattcttgtaatcccagctacttgggaggctgaggcaggaggattagttgagcccaggagttggagaccagcctgggcaacatggtgagacccccagctctttaaaaaaaaaaaaaaaaagactgggcaccgtggctcatacctgtaatcccagcccttagggaggccaaggtgggaggattgcttgagctcaggatttggagaccagcctgggcaagatagtgagacttcatctctactaaaaaacaaacaaataacaacagcaacaaaacatgagtgctggtacatttctgttgacccagctacttgggaggctaagatgggaggatcacttgagaccaggagatcaaggctgcagtgagctatgattgtgccattgcactccagcctgggcaacagagcaagaccctatctcaaaagagacagacagagagagagagagagagagagagagagagagagaattcccaggatttgggtatcatcacccattccctgggaagattgaacaatattagatttaaacctacctgccctctgcccctgtgcttggtactcccaggcagaaaaggcaatgaacaaggtcaagaatgctcagatgatctagaatgccctgttgggcaatttggtgagagaatgacaatgtgggtcggttcctggtgtctcatagcaagattgtctcttgcataaattttttaaaagtgctcttggcaagataaaggtatgaagctatgagacatatactcaagtgtttggaaaaattgtaacaattaatcagccaggcatggtggctcacaccttaatcctagcactttgggaggctgaggagggcagattactcaggagttcgagaccagtctgggcaacatggcaaaatccagtctctgcaaaaaaaaaaaaaaaaaaaaaaaattacaagaattagctgaacttggtggcacgcacctgtggtcctagctactcaggaggctgaggtgggagaatcacccaagcccaggaggcagaggttgcagtgagccaagatcacactactgcactccagcctgagtgacagagtgagaccctgtcttaaacaaacaaacaaaaaacaatcgttttcaattattgaaaaggaaaatcattttctactggtgatgaaaatacatgctacctcataagctcggcagaccagctccctcttttcagaagctggacagaaccagtggtagaagtaaagccctgtgagtcactccacttaggccagctaccatttcacatcgctaacaccccctcgaatctgttaacactttttttttttcctaaaaactttcttagtggatgtggaaaaaaaagggagggcggaggggcctgggggataaaggctactgtcaaattgattaagtgaacgctcattagagaaagtaacaagaggcaaaatctgcatatgcattgcagaaatgtgtctgatcttgcttaagttgtaaaagacaaaaagggctgaaaacctccctcgctggaagtacttgagggagaactgggggaggggaaagttctctaacagtaactttctttcattgtaaacacaagctagagcagccacagactccaacactctggtacaaactttgttttctaataatttgtagtacgattattaaaaaaaaaaaatttaacctgactgttcttagaatacactagccacttcctcaatttcttttaatgtaagatgtgtgtgtgtgtgtgtgtgtgtgtgtgtgtgtgtgttttgagacggagtctcgctctgttgcccaggctgaagggcagtggcacaatctcggctcaccgaagcctccacctcccagattcaagcgattctcatgcctcagcttcccaagtagctgggattacaggcttgtcaaaggtacatggagacttaaaccagttgattttgtgtcactggggcataagttttgttattgtgcagtacagaacagaattttttcttccccacttttaaaagaaaaacaaggcttcagtcaactatttgtgtgtgtgtgtgtgtgtgtgtgtgtgtgttgtgtgtatgtgtgtgtgtatggttgttggaggtgggtgggggcaaccctcaccaaagtcttctagcttattggcccaaacaaataaatctagaatgaagatccagattccaggtagcaatgttgattttggaggagataagggtccctctgcttcttatgatggtcagcttggtagtgtaattccaatgcttacgctagctacttggataacccttttaagaggatagtagtatttccagttgtccccatctatgagggtggcttaatattacagccctaggatatcatcaggataaccctgatgattttttgtcggtatgtatttttaaggacaaacgtttcaaaaataatgtcaagtctgaaggccctgttaatgttcacactcatgcattcttgcgattaacgttaaacgtttttgctaatacctctaacttgcctcctcctctcatgaaacctaaccagaaaatttcttaatgaaagcgatgatgatgtcgaccttaacctccagaatgaagatacttcaggacttagtctgagaaggtaagatagacgatgacatcaaatgtaccccagttggcagaaacccttaattttgtgaagttaaaagtaagaaagacacaaacctgacatttcttaggtttagaagatagtcagcataggtacttgaggtgtgaacctaattgtcttgaagatttgaaaagaaatgagtaataatcataattttgtgccagagaatgttctttgaaatatctgcagactggagacaaagcagttcttctcctatatggggttgtctgagccgttttgcaccattatgtgcttcggagatccttgtaattacaaatttaagacttaaatcttcagtccttctttatatttctaaactacccccataggtatatttacttctttcttttgtcaagcttaaacatttccaattacctcagcctctaaagggaagcgtgatggttaaattcctgcactagtaatgacacttattaatctagttctggtgagaaatgttgaacctcttgccttcccaaatcatacattttaattctgaacacacctccaaagaacactgacattgtttaattaaaataagagtgcacattaataagaaaggatatcattttgtcatttatatgtaattctattttgttaaaaaaaaatgaacagagactggtaagttccataattgccctccatggtgaagaaataagtgtaggagagaagaaaagcacagtaagacacatatgttagtaaaacactccttaatactacacaagctacagaaaatgctactttgcatttggtcctcaacgtggctaactgcaagccattgagtaaaaagtgtaccttttaaactaattccttggtcagaagatagagccacatcttgaagcctcctcattaatgtgctataatggtcaaataagagattaatagcaaagtcacctgctaaagcaaccaggaacctgttgattaacaataagcctccaaaaaataagataccagattgcaaagcaaaatcaagtcccagggcaacaagtgcttctgtaatttattccttctttatatgagggcataaagctccctttataaatgtgttttctaggtcctgctgtgagctgtaggtgtgagcttttcagctgatttattaattttagtttcaatcaacgtgtcacctgcagacacaaaaatgtaggcctcaccacagaaaatacaatttaaggaaaaaaaaaaaagaaagaaagaaaaaaatggggctttaattcaaaaactctgccaagattttttttttaagatgaacactggaacgcctattctttgagatctaaaataattcccagcaacgtaattaaaaaaatcaaaattaaacatttttgtcatacttcgaaagtcagtcttagacccagggaagagtaacatgacgctgccaaaacaatcagctactcttgtcagtaggggtacattctccccaaagaatcgaatgaacaacaagtcccctgggcaaaatgtgcaaaaaattctcaattagttgtctttatttagtgagcactatggggtcctcaaccacactatagaattatggcaagaaagctgagctcttcactagcttattagcattctcagagggttggagtgctgctgatagcaggctgttgcctccaagagctgttggtgggacccctacactcccgggctttgtccttttgtccttctaagccagcaggaagtactgccccatgttcagggcattctgggataccttcattccattcacagtttgcattaccgacaggggccgaagtctttgttattgactatgaccatcactgttgcaggtttcaatgaaaagcaaaagcaatctgtatcagtcaattctaaatgaaggtttaggaagtagcccccttccaaatgaacatccttgtagggctagagtggccttacgtggccaaagccccataggaaatcaaggtctcggcttataatctggctgctgcattcttttcatccgaaaactacagtgttaggcaagggaaccaaaatgggagtgggctaacgcatattccagactggtgcctcagcatatacatttttacagcactcctttgcccatagagctcccccaacaccctccttcccacacaaacccacctatccctaactaccctttccccagaaaaagaaaaccagaaagatgaacacaatgaaaaagaactggcagcaactattagaaatgccttttctaaagaagagggtatttgctgctttagggaaaacactatcattgactaaattaacaagttgtcttatcaactgccataagccttggagtctaattaatttagtactgatcaatagtcctgaatgaggcattgatttctgcctgcttgacagggctgcagctgaaatcactttctctgtatgccacacacacacacacaaacacacacacacacacacacacacgcacacacacacacgcacacacacacgggcacccgaagcttatgcgttatcacattaagattttatttccctcatcccatatggacatgaatttcatgaaccaactataaatgaggaaatgggatgtaaagcaactttggaagtaagaacagattcaccagaaagtgcaaacagagcttgaacactccctgccaaagttctgctttatttgaaaatgtcctctgagtgagataaaacatttaaaaagaaaaaagagaagctgaagggttttgcttaaaatacatagtagatgctctaattggtcacgaaacatgtaaaaatggattgggttatccaaagagtaatattcttctgtctcttgttttttaaatgctgatgatactttattaaaaatattctgacctaaagaaataaaagcagtaatgctctctggccaagggcagaagcagatggggagcctttgataagaatgaaaacatgtgaaagatctaccccagatttgtctttcactgctgcgattggtgagctaggggtgggggtgcaatgaggaggacttcccactctccccacccccacacacaccaaaaaaaaaaaaaatcaatggggataatactgggacagtatatgttcaaaataatttaagcatttgactttttaatttttacttggactgacaagatatttattctattaagatatatattccaaaaaagggctaggtttgcatcaatgttttcacattttcctaggacacaaccctgcattttcttttgggcccctgcttgtttttgcggctgttcattctcattgtgcaaggcctccttttgacactcctgaaaatcccgggaccttccccttaggccaggccaccggacagttttttctcccattcttaaacatgacttgaaataagaaggacagcaaaacttttcaaatattttaaagatgatgcttcaatttcaaacagggaaggaagataactcaagagcttgactatctcagaacgattttctattcaataaacatcaccaagaaaaggaaaaggaagataggagaactgaaaatataaactgccttttttttttttttgagacagaatcttgctctgtctcccaggctggagtgcagtggtgcgatctcggctcactgcaacctccgcctcctgggttcaaacagttctctgcctcagcctcccgagtagctgggattacaggcgcccgccaccacgcctggctaatttttgtatttttagtagagatggggtttcaccatcttggtgagggtagtcttgaactcctgaccttgtgatccaccaggctcggcctcccagagtgctgggattacaggcgtgagccactgcgcccagcctgaactgccttcttttacaggttggagaaaccatctaaaatgatcaaaacaaaacaaggaattcatattctttcctgagcatttatttaataccatttagctttttaaagattacacacacacacatacacacacacacacatacacacacacatatatatttgaaagtcctaggagagtcccacccttaatctctttgaggcctctatgagtttccatagcactttacaaaagatctttattgaggaaaggattggacaaactttccttatatgtgtggcccacaccattaattgccccatctcctttagtaaggccttattcctatgtaaatacccttgcataatgttacaggctattgttaggccagcgccagtcagtcgccacttatatgcatttttacttcaatccgctgctcagagaatgaaaagatgtctggacttaagctgtttaccaactgggccgaagctgcagagcggcaaaactgaagaaagccccaagcaactgcaggaacaagcttttacaatgcgagcagccattttcagttgagttattaacccaccctgaaactcttctaagctatgccttttttaaagaacaaatgtgctgaatcaaacatgaatgagccagaactatgaagagagaaatcctctaaagaactattgaacacaacataggtttgtaatcattttgtctcagttgcctgctaccaacattatcaaggatgataatgctggctcagttgaggcaattgtctcataattaaacaatagtgcggtacagtaaaaacacacatgcaagcgacacacattccgaatcacaaaacagtgtgcaaggctgagttaatagctcaccaccaggatctactactaaaaccaccaggatttgactactaaaacacagtgatctttaacgagaacattggaaaacgcctccaaatccaagtctgtgtgattctctcaaccctatgtggcatcatctgtgcttaaatagaaaaaaaaaaagtttttttttactttatagttgtaatgatcccccggcatgacacaccatgaaaataaaggagcaaaattctaccaaagggagctagcttttttctctgaaatatgtgctacaggcaaagatcattgtatgtatttaatggcatcacaatctgagtagtgtggtattagcctaaagaaactcttgactatttgcatgcttattaggatccaatgagtacttaataagtggatatatatgacagaaaacatctcattgcatagttagtgctacaggaaagacgggaagacacacacacacacacacacactctgaagaaagcagtcttgagttaattaacatcacaatgcaatcaagtacaacagtcatagctgaaaaccatttctattaaagctgctagactcaaccttgcctctgcaggtcagctatggcactgataacctttccagcagacaaatacatgtaacatcgcctcatctaattaaaagctcagggaggtgtagaaaaataccagcacattgaatccaagcaaatgagtgctgccttcggctgatgaagctaccatatgctgctgctgtttactctggaaggaaactgagtcacttaacatttcaataggttaatcaattgacaattaaatagagaaattggttaactctgaaaacaattaacatgacacgccattaagtacactttctaattgccacagctgtgagtagaaattaacgtgcatgttaaaggatctaactggggtggcactgtttttgtgtgtgtgtttaagaaaatggaattagctgaaaagtcgggttttacttttatagattagacagtaggaattctatcatcaactgccgttttagcagaggggagctatgtatgctttttccttcttttaaggactcacttcaagttgttgaaatatttaatttgcaataattaattaaaatagcccaaacccctcccaccaaattacaggttggtgaacaaaaagagaaatcgctccctttgcccattttgtggacagaattactttgcaggaacaggtatatttcaagatttcctttctaattaaacaatgcaatgcacacattgtaaagacagaattttcactgaacattttcatgaatggtttctggttgttggctgtatcctgaaccttactgtaaaatggtaacaatagtgtttgctagtcacaattttaaattagaaggccaagagtttggattttatagactaatacacatgcctgctatagccagttggtaagacaaagaatattcatttacaaaagaggtgataatttaagtaaatcataaatcttttgatgtatgttaaaagccaaatacatatttttgaatgaaagagtatctttaagaactgattatcaaaattattttatgtaatctctcccccctcatcctccttactacctttttggataactttactatctctggatgctcaaagatgaataggataaatcctacttttagggactgatggtctggcagtggggagagtagcactggaggagaagaggctaaaggacttagtgagctggtgcaagagaggaacactaagaagactgaaagttttctagtttggacccctggtttggtagggagattattaatcaaaataaagaaggaatgcaggttaggggtggggtggggataacagatagtaaatttaatttaggacatcctgaattagaagtgtcataggtgcagatgtcaactaggcaattaaacatatatacatatacacacaagtatttacatagtatatttacacgtatatatgtatttatgttatacacacacatactatatatatgtgtatatatatacctgaaacttgtggactagagatttttgggagttgtcagactattagcagccacccgctaaaagtctggacacctggtttagtagtgaggtcattcatcaaaataaatgagcaggtggctgctaatgatatggaagtagatgagactgtctatggagaacacgtacaatatgaagaataagagaagaaggctgagaacaagatcttagggaataccgttatgaacagggtagacagaggaaaagccagcaaaggaaactgggaagaaagaggaaaaaaaggagaatgaaaagagagttgtcatggaagtcaagggacaagagaatgactactacccatggttaggtaggagatcagcaggacatgttttccaagcactggtcacgagatcctgctcaaaacaggagctgatcaaaacgatttgcaacaaaggaactggtcaaaaccagctaaacccaagatggcaatgaaagagacctctggttgccctcgttgctagttgtatgctaattataatgcatttacatgctaaaaaaaattcccaccggtgccatgacagtttacaaatgccatggcaactcctggaagttaccttatatggcttaaagaaggaggtagcctcggttccaggaactcccagaaggttcacaaatagcccactctttatttaacatataatcaaggaatagccattatatagctagccagcaatctacgagggctgctgcttctgctgctgctactactgcttctgctgctgctactactgctactgctactgctactactctgtctatagagcagccattttcctgtactctgtttctctaataaacttgtctttgctttgctttgtttgctcgtttgtgaagtctctcctgtgcaaagccaattttgaagttgggctgcatcaaaggggtctagtaagaagctggcaacttagaatatggcaatttggaaacactggtgtcttggtgatggttgtttggttggcatgatgaaggctggagtcagaacatcatccccacgggagaaaagttaatggatgatgaggaaggagagatgttggactactttgagaagcttgattatgaaggagagggacagagcagtggcttaaggactgcaggatgtgaggacagttttgtttaggtctgagtttggaaataattgaagatagggctatattcagatgacccagaatggaagatggaggttctgactgctgactgctggcgtttgtgtgtgtgtgtgttctaaagtagaagatgaagtctgggggcttcaaggataaatgattcagaattgttgttgagagactcagaagaggtatgtgactgagatggagaaaaaggattataattgaaaggctatgtgaggctgggcgtggtggctcacgcctgtaatcccagcattttgggaggccgaggtgggcaaatcatgaggtcaggagatcaagaacatcctggctaacacagtgaaatcccatctctactaaagatacaaaaaaaaaaaaaatagccggttgtgatggtgggcacctgtagtcccagctacttggaatgctgaggccagagaatgatgtgaacccaggaggcggagcttgcagtgaaccgagattgcgccactgtactccagctggggcgacagagcgagactctgtctcaaaaataaataaataaataaataaataaataaataaaaagaaaggctatgtggaattggaaacaatatcctcatggtcatactcatctgcattgcatcttggaccatgcagacaaaagccacccttgataaaagcaatgggcttttcctttaggggaattcttcattcacgtatgtatttatcattcaacaaatatttatgaatgcttgccatgtgccaggcaccattataggtctccaccagcagtggtccccaaccttttcgacatcaggggccagtttcacagaagataatttttccatggactagatggggggatggtttggggatgattccagcacattacatttattatgtactttatttctgttactattacgttgtaatatataattaaataattatacaactcaccataatgtagaatcagggggagccctgagcttggtttcctgcaactagatggtcccatctgggggtgatgggagacactgacagattatctggagttagattctcataaggaacatgcaacctagatccctcgcacacacgcagttcacaatagggttcgtgctcctatgagaatctaatgccaccgctgatctgacaggaggtggagttcaggcagtaatgcaagtgagggggagcagccgtaaatacagatgaaggtttgctctttgccagctcctcaccttctgctctgcggcctgttcctaacaggccgtggactggtactggtctgtggcccaggggctggggacccctggtctctaggacgcagtgatgaataagacagacaatgtccctgccctcaagggcttgaaaagaatcctattttagttacaatagtttcacccttaggaagtgatatttgagcctttttctgaaggttgtgaaagacccagccagtaaggatctggtggaagggcattctaagagttaggggaatagaggatttcttgaagttgaagaacataggtccatataaaacattgtttcctacttcataaggtcttactattgtaacatacacgtaaaataaattatgtgctatcttgagtttatcctagtaattcaagtttgtctccccaatgagtggggaaggtatacttaagagcaggggtagtatcctgtatctatgttgtatataacacttccaagcaatgctggttatagagcagacacttaaaatactgtttttcatccttgatcagtgtgcaacatgagttttatgagatacaaatgtagtagttgtaatttttttagcttgctcttgggagctctgtgtggtcttcaactaagaaaccatgcttatggcacaaaggccagttgtcatgtaagatccctttcttgtagggcaatagtcacagatttttatctgtacacaagattatctaggaaaaaaacaaaatttcccagtcttttttatagctacatgtggctagatgactaggttttgaacaatggaatatgaagagaatggtgtatgcaacttctaagaagtgatattgaagaaaaaggacactccttttcttcttcctcctccgtttgtttacttggaccagttccttaggggtggatgtgttggttgaattgccatcttggactatgcagacaaaagccacccttgtgagcaaagtggaaagtgagaacagcctgggttgcagatgaccaaggaactgtcatagcaaccttgaattgcttgcaccttgacttttacataaaaaagaaataaacttatattttgttaaagccatgtttataaaacaggctatttatttatttatttaatttttgagacagaatctcactctgttgcccaggctggagtgcagtggctggaacacagctcactagagcctcaacctcctgggctcaagtgatcctccttcctcagcctcctgaatagctgggaatacaggcgtgcaccaccacactcagctagttttttaaattttttagttttatagggatgggctggttttgaactcctgggctcatggatgcttccaccttggcctcccaaagtgctgggattatagccatgagccaccacacttggctggcaaattattcttctaactatcctatcctatcctgtgctatgctatgtattctaccctaggtttaaatacaaagctagcaaccatgcagcagacattgttttatgagcccatcgattatgtgatataatatttgtcataatattttaggaataaattggttctgaatgatcaagtgaatctcaactacatgtaaatcccaacacaatgactgtcattgtttaaaacaaagctatttgcatgtgccaatggatggatgaccataataagtcacttttgtatgcattcatatggctatggcacatctgggcccattttccttatcattgatatcttgtccatgtaaacatacgaaaattcatacgatgattaacctttcttgtgggaatgagtccatcaaaagcatgaattttgctttattttcatattaacaagcatcaagaaaggataagattttttgtttttattttttaattgtttttgagacaaaatgtcttgctttgtcacccactggagtacagtggcaccatcatggcttacttcagccttgacatccggggctcaaggaatgagatttttaatccttttttttttaaagcaatattcactgactgtaggtatttcagaccagatttctgggcctccccagatttgcttggcttgagtgcctcctgggcctcctctgcttgcttggtatggaacttggtcaccaccattgtcactaccattgtcttttaaaactaccaaggcttctaaagcttactcaattctcactcggcctgccctacatctggtccaacaggaggcacggcagctccagcacccagacctgaccctactgcacccacgtaggctgtagcttctccatcacttgtggatccagatggatcacacatattggggtatggaatttgtcttctccagcagatggcaatgaagccgggtagtgcatttgaggagtgtattggctgcatagggccagattcagacaatgagagacagggaacagctgggagctccatagtagcctgcctggaagatgtcccctaggactaaacaactgactgtgttttcttttcctttattttttttattttttttattttgtgagatgaggtcttgctatgttgtccaggtctccaactcctgggctcaagcaatgctcctgccttggcctcccaaagtgctgtgattacagggacaagccactgtgcatggccaactgtgttttcttatgaagttgtggtcaacttaccatgttttacccgcttttctttcttctatgcttcaattccccttttccctcagtctgttttttttttttttgatatggagtctcgctctgttgcccaggctagagtgcggtggtgcgatctccgctcactgcaacttctgccttccaggttcaagcaattctcctgcctcagcctcctgagtagctgggattacaggcgtgtgccaccatgcctggctaatttttgtgcttttagtagagacgcggtttcaccatgttggtcaggctggtcttgaactcctgacctcgtgatcagcacccccccagcctcccaaagtgctgggattacaggcgtgagccaccatgtccagtctccctcactcttaaaactctggcattacaccttctaataaagacttaggtcataacttttgccttggtaccatcttttgaggacaccagtgtaccagaaatgtaatgaagatggtaatggtagtatcgtcatcaagatttcagtccaccttttccagtgagaatagggaataggaagagaagcaaagaagtatagagagggcactgctagcccacataaactattgtacaaatttaaaaagctgacttctctggatctatgcaactcacaggcacggcttattgcatagaatttgtactggatttgagctctcaggtatcccctcagctgcatgtccttatgcaatgaacatcctatacaaacatagtcttgagcatagtagaagtattatgcaacttatgaaggaggaaattcagaaagctcagttttgtaaagcacttctaacagcgcatgttgatgtggttatatccagttctaagcaagagataaattttacacttattgtttacagtctctgtttatatgacagcttatctttttttaggaaacagcttaaatgggtcttttccttagtaggctggtagaagagagatgagttgagctgggttataactagtcaattcaatccatgttgaaactggtgtttaaaatgttccaggcattatactacatggggagcaacaataaggaatcagcacgagtttgcatacatttttagcatcactgaataacgcagggtaaagagcagagaaaatggatgattgtgcttattcaggactgagaatgcctttcccttttttcattagctactcacatttttacctaccactcaaacctggttcaggttctacatcactcaggacttcaatcttctcctaatactcaactcccacccccgccccccacccatggaggcagttagattttctgcttcaccattttcgatacatcaaaatcccaaagaaatggaagcacaacagctattctcttcgatttatctgctgagtacaaacctccctttcaaaacattggaatactcatagccctcaagatggcaggcggaactttggatacttggtggaatgatggggcatgggagagggaagcagagaaaggaaaagccagcacctgtacttaggtggggccgaaaagaaaagcttgcagaccccctcactacacattctataacagaaagaccttttcaggctcccttagttcaacaaacatttctttgttgcttaccatatgccagaccatgtgttaccacaaaggtgaataaaagtttctgcccttcatgaacttacgatctagcgggaaagatgaaaacatgaacagacaatttcaacataataaagtgactgctgtgagaaatgcatgaagagtgtgcaaaggacagtggtggctcgtcctgccttcagggtgatggaaggcttcctagaaaagacccaggagtgagtctgtcactcagggactacttatcacctgactctctgtatgacctatctctctagccttatcccttgtctgtctccacctaaccctcctcgatttcctctgcaatgattcaaactccactttccctaattttcaaacactttatgtttgcacaagctacactttcaatctggatgctcttctcccacttcccaattctggaaaacctctatttatcccttactactcacctccaaagtaatttctctgacgctttccctgaaacttctaggcagaattgcctccttcctccttcctgttcctaacctaccattgtacttctaagcccaaactgagctctctagcctaccattgtactcctgtgtttaccaccgtgtgcttctaagataatattcaccacatttttttctgcatgtttgttttcctgcattagactgtgagcttttagggcagaagtcattcatctttgtttccccagggactagcattgcaaacggtccttagctctgtaacttggtatttgagggatgaatgattatatataatatactatggaaacattgatgatgcagtcactcactgtgctgttcgcgctgaatgaaacatttgaagcatcgtgttaacatagtaaataggcataggtgacatatgagagaggctgaagcagacctctttgactgtggtattcaggcttccttgctggctttctttgctgggggtttctttttgaggacatctattttttttttttttttttttcctgagacggagtttcgctcttgttgtccaggctggagtgcaatggtgcgatcctggctcaccgcaatctccacctcctaggttcaagcgattctcctcctcagcctccccagtagctgggattacaggcatgtgccaccatgcgcagctaattttttgtatttttagtagagacggggttctccatgttggtcaggctggtcttgaactcctgacctcaggtgatctgcccgccttggctttccaaagtgctgggattacaggcgtgagccaccgcgcctggcctgatgacagtctatctataggcggcatcagcaagagatcagagtcaggggaaggatgagggtatttattctcctggctctctctctgctggtctgttggtaggcagcggctgcatgaggccacatcctaaggccacagcctctgttgatgaactttcctccaccacagctctttccagtttcccataaccactccctgtgcccctctggtctcaggtggttttgtcccttcactgatgccagcccagtggtgccataatgttccttgttagtttcccttaattctttgttaacaacctttgtaaacttcttcttcattaacatgcatacagatctatttttaattggtagtggagaatcacagtgatagaatcaaatcatagttttgatttgctcacttaacatgacatcacaaacatttctcaagatttccacgaagtctgcacaatgaccatttcatggcaacacaatattccaccttattatgtacaatagtttcctaatatatttttccttccctttccttcccctttacttactttttcttttcactttctttctttgtttaccattacagatgacaaaataaacattctcaaggtgcagatttttactgcatgtatcttctctttttttttttttttgttaaatatcctgaagtcttttgtgttttagccacatttctaccttttcttctgaatttttctataggcaaatagttaaactcattctacttgaaatgtatttacactcacttgtcaacagacatttgtttaaactatactctccacttgaaatactgtcttctcccagtttttcaaatgcaaacctccctggctatccaaattagaaatgttattctgtcttttgagttttcttttgaactgacctattcaaatagtttatttggtaataagtgatttttattgttattttgaaatgtaaattaagtcttttaggttatttaactttaaacatattattatattttctcttccaactagactattaatttcttgacaataggaactattttcttatatcactttatgtctcttatagagactttcatgtagtaattgtttcataaacatgtgttaatttggaaaatgttggagtaccataaataaaagattggctttccaaagcctatataggtttaagagcgtttacactgagttctctgttcatttctgtgactacaagccatggcttcattatatgatgcttagatttccaatgttgtgtgagagtgttattgctcttatgtgacattaggaggggaaatgtcttaaaagtgtgtttacatctctctaagtcaaagtggagcccgtgcatgagaaagaaacaactccacaatgtagatttaaaaggaagagcagtggtgggaaaaatcagcttctgatggctaataatagagattctaagttattctataacatttgccctgttttattttcattatagcgtgctatcacctccagatatgtttaacatttattttgttatttgcaataatgataaaaccttccttactacaactaagatatatgctacatcagagtaagggctttttctgtcttgtattctgtattgtattctcagttctagaataggcatggagtaggcactcgataaatatttgttgagtaaattaatgagtaaatgaacatctattcacacagtcgtgcattgctcagcaccagggatatgttttgcaaaatgcatcattagacaattttgttattgtgcaaacatcataaagtatacatacacaaaccttgatggtgtagcctactacacaccttccttactgcaactaagacatatgctacatgagagtgaggcctacatctaggctctgtggtatagcccattgctcctaggctataaacctgtacagtatcatactgtgctgaatactgtaggcaactgtaacacaatggtaagtatttatgtatctaaacatagaaaaaacacagtgaaaatacagtataaaagattttaaatggtacacacctgcataggccacttaccatgaatggagcttgcagggctggaaggttccctggctgagacagtgagtgagtgggagtgaatgtgaagcctgagaacatgactgtacctactctagattttataaacactgtacacataggctacactaaaatttatttaaaaaatttctttctttgataataaattgacctcagcttactgtaacttttttacgttataaacttaaatgtttttaactttttgactcttataataacacttaaaacacaaacatcctagcactcaccgtacaaaaatatttctttgtatccttattctgtaagtgtttttctatttttagatttttagaagtttttttttttattctattaacatttttgttaaaaactaagacacaaacacacacttaagcctaggccaacataaggtcaggatcatcaatatcactgtcttccacttccatatcctgtcccactggaaagccttcaggggcaataacacgcatggagctgtcatctcctatgacaacaatgccttcttctggaatccctcctgaaggacctgcctgaggctgtcttatagttgaattttctttttttaagtagaaggattactctaaaataacaataaaaagtatagtacacaataaacaataaacaataaaaagtatagtatttatgtagtaaatgcataatctggtatcatagtcatttattatcattatcaaatattatgtacatacataattgcacatgctgtacttttacacaactagtaatgcagtaggtttgtttacatcagcatcaccacaaacatgttagtgtgttgcactatgacattatgacgactaagacatcactgagtcttgaatttttcagctccatcataatcttacgaaactatactgtggtccgtcatggactgaaatgtcgttacatgatgtatgactctgtattttgcaattttccagatagtgctataagtgctttgttttccttacctcatttgagcttcagtacatcctactcaataggtactatacctttttagtaaggagaccgagtcttagagaaattaaaggacctccaaggtcacatatctagtaactggggaaggaaagtaagaattaaatccaagcagtctgactttgagcccacagccttagccacagtattaaatttgtcggtgcaatattgtgaaataacagcaatttggccaggcacggtggctcacgcctgtaatcccagcactttgggaagccaaagtgggcaggtcacctgaggtcaggagttcgagaccagcctggccaacatggcaaaaccacgtctctactaaaaatacgaaaattagctgggcgtggtggtgggtgcctgtaattccagctactccggaggctgaggcaggagaattgcttgaacccgggaggtggaggttgcagtgagctgaggttgtgccattgcactctaacctgggtgacaagagcgaaactctgtctccaaaaaaaaaaaaaaaaaaaaaagagagagagaaaagaaaagaaaaagagaaaaaggaaagaaaagaaataacagcaattagcatttgctatgtgcttctaaaatgtataagctattttcacatctgttttctcttttaataacattcagtgacctgagctaatgttataattatccctactttacagatgggaaaactgagagatgaagttatttgtcaaaagtcacagtgccattaagtggcagacttggaaattaaactcaaatcttctcagtcctcctggcatttaccatgcaacagtttaaaatggccagagacccacatttatggttttagacatatgaaaagaaattctatttcagaagtctctaataaaacaactgcatttagtagttactaataaagaattctgttttaatattcactaattgtattttagtagttactaagtcattactaataaaaaattacacgagctctattttttaattaattaattaattaatttgtttttgagacaggttctcactctgtcacccaggttggagtgcagtgacatgatcacggatcactgcaaccttgacctgccagtctcaagtcatcctaccacctcagtctccccagtttctgggaccacaggcaccccacaccaccacaccaggctaatttttaaaatttctttttgtagaaatagggtctcactgttttgcccaggctgatcttgaactcctggcctcaaaggatctgcccacttcagcctcccaaggtgctgggattacatgtgtgagccaccatgcctggcccatgagttcaaaatttggggggacagtccccaagcatctttgactttggaaggatatgacattaacaacattttcactggtaactttcacaaagactgcacaatcattggttcaggaggctctacgatatgcatttgttttatatgttgaaagacatttacttatgattggtacaataacttatctcctcctctcctcttagatacttagtcctacaacaggtgatggcagatgtctccaaagtgttttttcttttgacaaattaagatatattgtaaacatgattctgacaagtaagattcacggcatgaatgtaaaaaaaacagtctgggtgaagtggctcacacctgtaatctcagaactttgggaggctgaggtgcactgattgcttgagcccaggagttcaacaccagcctgggcaacatgtcaagaccccatctctaaaaagaatataaaaattagccagatgtagcagtgttttcctgtagtcctggctactcgggaggctgaggtgggaggatcacctgagaccagggagatctaggctgcagtgagccgagatcgcaccactgcattccagcctgggcaacagagcgagacactgtctctgaaaaaaaaagggggggaaagaaaagaaaaaagaaaacagaggagtagcagtaaaagttacggaggctgaaaagatctcgaggctgcacaggaatggcaggagacacaatccagagcagtggttcccaacctttttggcaccagggactggtttggtagaagacaatttttccatatatgggggtgggttgggggcaatggttttgggatgaaactgttccacctcagatcatcaggctttagattcttataaggagtacactacctagattccgggcatgcgcagttcacaatagggttacgctcctgtgagaatctaatgccactgatctgacaggaggcggagctaaggccgtaaggctcactcacctgccactcaccttccactcacctcctgtgcagcccagttcctaacaggccatggtccgtggccgggggtttggggacccctgatctagaggttgcactgaggaatggcaggagataggatggagagaaatctgaatcaatgtgctggagaatggctgatggtagtgacaacaggaaaaggggtgtcaatcaaggagggcacagactttactagtatgagttgtgggataaaggtgaggagggtttgataaggagtaagtagattaaagaatatgtcaaccttctcttcagggtaatggatgaagaggtattctccacttgtggaaggcgagaagggaagattgtcactgtatgtcagggtaagatggtagagtaactgttcatgatatgaagaataattagccttataataggagatccaaaaggcagcaaaaaatgacttggaaatctttaggaatcagaaactgaatataatttaatatagaaatattatcattaaatagaaaggtattatactttgacataataaggaagtattcctattgtctattcaaaagtcttacttttcatgaagcttttaaagtttataagcatgttactggccaatttgatgttcagattaatccaagactcaccttagcacatgctgatctgcccacctgcttcttcaacatgcacagatttctctcttttatgaacatgtgtggcatttactttccatactactcacttggaatttgtcataatgagcttctccatgatagtttcagtttttacacacacacacctgtaatctcgccagctaggtgtgtatgtttattcgaagtaacctgtgttcgagagtacctgccacaggctttttcctagagctgcaatgcctagtttggggctgacatatttgcttactcagctactaattgctgagtgattatttaggctttatttgggctgttttcttcttcacagccagcaaaagttgcagtgaaaaccacatggtacaatttatgggaattcatgagttgtaattcattcacaattttacttctagatgaaaggcaatgagtatccctttaagtgagaaatttgacaaaaactggatttttaaggaagcatcacctcccccaaagggtaggcttcctttctgagatctcctagctgccaaggttgctaaggcaaacctttgcatatacaaatttgggtcaatgtgttgacaggatgtcagatttgtgtagctaagggagcttcagcatgaatattgagctgtatgccactccattgatgcccaaatgaacctgtaggtgcctatttgtgcctgaggctattggggtggaaaatagaagcccttcttgtgaaaacctaaccaaggtccacaacccagccttgaccagcagcaattggttttcagcaacaactgaaaagtaaattcaaagagatctgaatgatggagcactggtttcttttcatcatacagcctgtaatttcatgttgcaattatttttcctcataggcttacctgtgcgtatattagaagtcttcccggtgccaggaatcaacaaagagttgagtaacgaagaactaatttaatcagctaatttggagaaactaagtcttacaactattatttagttcatcaaaacaaataaatctcaatgagaacaatgaaatatgtgataattcttttttttaccagaaaagtactgcttgaaattatattttagggctatgaaaattttacttgagattgaacacagtaaacttcagatgacttttatattatttaagaaatagaagtgtgaattaaatagtattcaccataagcacttgttttaacttcttaatgttctgttacgtaacattttgttatctgggatttcactaattagtgtttctacatatgtatactacaatgataattgatgttataattgatcagtcacaatgattttgagttattgagtgacctttttaattatcaaagatttagttgtacacaaacctagttttacttgatatttgtttttaattattattttataagaattggcaatctattagaaaaccattagctagattatttgaataatatccatatcctccaatcatgtaagataatataatttattttctttgctccagtagacacctggggtatttgaaaccttgagcagatcattttttcacacttccctcgtcttatacaacaaaattatcttctgtaaaatttataaaatgaaaccaataataataatgtctaaaaaagaaatgtaaactatgaaaattttattttactgaagtttaaatttataattgttcaggtaaaggaaaaataaagaattctaaataaatagagattatagtacaaaaaatggaaataatgaattaatagtctgagtatattaatgcatttttttgagaaaagggaaaaatattgtgtctacatatcagtctgttgcagtaataaataatattataatttctgcttttcaccttgagctataatttctgcaaatttgtcagtgactttgtcaaaattgatctttacacatttatattcaatagataatatagtcagacttatcctttccctttgttgattaaagaacacttttggccgggtacagtggctcacgcctgtaatcctagcactttgggaggctgagtcaggaggatcacttgagcctagaagtttaagaccagcctgggcaacacagaaagtccctgtctcaaaaaaattaaaaaaaaaattaaaatcttaagaatatttttaattaactttagttttgaaatgtttcttttatatgaagcaaaatataaccataggaaaagttttaaacaattttggcagaaattcataaaaatcccattttacaataaatcccatgtctttgttccttcagaatcaattctaatggctcttaaatatttctgcagtagaaaaaaattaactataaataaaaattccaacactcaggatgacaggactgaagtaccttgaactctatttctttgtctttataattgttatggtttgaatgttttccccaaatttcatgtgttgagaaattaatccccaaagtaacatgttgatggtatttgaaggtgggatctttgagagttagttagggttagataaagttatggaggttgggaccccctgatagtacggtgactttataagaagagaaagagagctgagctggcctgctgttgccctcttgacatatgatatcctctgtacatgcagcaaacaggacctcacagatgccagcaacttgactttggacttcccagtctccagaactctaagaaataaatttatttatttttataagtcacccagtctgtggtatgctgttatagcaacagaaaatgaactaagacagaatattggtaccagaagtggggttgttactataacaaatatctgaattgtggaagcagctttggaattgggtaatgaccagaggctggaagaatctggaggagcagcctaaaaataagcctgtattgccatgaacggagcattaagggtgattctgctgatggcttggaagaatagaagactagggaaagtctggcacttcttagagattacttgagtggtcatggccagaatgttgatagatagtaaaggtctcagatggaactaaagaacaaggtattggaaactgaagcaaagactattataaagtagcaaagaacttggctgaagtatgtctatgctttatggaaggcagaatttaagagtgacaaattagaatatttagcagaaaaactatctaaacagcaaagcattccagttgctgcatagctacttttaactgcttatagtaaaataggagagaatacatacatatatatatacacacatatatatatacacatatatatacacacatatatatacatatatatacacacacatatatatatacacacatacacacacacacacacacacacacacacacacatatatatatatatatatatattttttttttttttgagatggagtctcgctctgttgcccaggctggagtgcagtggtgctatcttggctcactgcaacctctgcctcccgggttcaagcaattctgtcagcctcctgagtagctgggattacaggcgtgcaccaccacgtctggctaatatttgtatttttagtagagacggggttttgccatgttgatcagcctggtctcaaactcctgacctcaagtaatctacctgccttggcctcccaaagtgctgagattacaggagtgagccaccatgccccactgagaaaagagattatttaaagacagaacttacaattaaaaggaaagcagagtggaaagatttggaaaatctgcagcctagccaagtagtagagaatgagagtattttcagcagagaaatactacagagtgaccaagtgactgcttgagaagatgagtatgggtagaatggaaccagaggctattcattaggataatgggagaagaacctgaaagtatctcagagatctttcaggctgcccctcccatcacagtcctagagctgtgggaggacaaaatggtttcaggggacaagtcattgcccagcgtcacctccagtctctgctacctgcattcccatgcagtgtttctcagccacctcagctgtggctcaaatggttccaagtgtgactgcaccagccactcctgaaggtatagtcgtaaatcttgatggtatccacctggtgctaattctgtaggtgcacagaatgcaagagctgtggaggcatggcttcctccacttggattttaaaggatgtcataaatagcctggggaaacaggcagagacttgccacaggagcggagacaccacagaatgcccccactacagcaatgcctagtggagctgctggggcaggatcacccctaaaaccccagactacaactaccagtgtgcaatgccaggctgggaggattccatgagacttcaacatgtgaaaagagctgcttgagcggagtccagcaaagccatagggatggtgctgccgaagatttgaaagtctaaacctgcagtgtttctaggaggtggcatatggagtcaaagctttaaggtttaaagttgttttcccttttgagtttcagaattacttgagaccagttactgcttattttctttcctctttctctcttttggaatgggaatgtctatcctatgcctgtcccaccattatattttggaagtagataacttgttttgattccacaggcttatagctggaggaaatttgcatgggataaattgtgccttgagtctcacccagatctgattaaaatcagactctggactttggacttttgaagtggtgctggaatgattaaagattttggggatattggaatggaataaatgtattctgcatgcaagaaaggcataaatttcaggggccaagggctgaatgctgtggtttgaatgtgtttctcaaaattcatgtgttggaaacttaatcctcaaattcacatgttggtggtatttggaggtagggcctttggaaggtaattagggtcagataagatcgtcagcgtagggcccccatgatgggactggcggctttataagaagagaaagagagagctgagctggcaagctcttacctcttgccatgtgatgccttccgctatattatgatacagcaaaaagggccctcaccagatgccagcacttcgttattggacttcccagcctataaaactgtaataaataaattccttttctttataaattacccagtctatagtattgttatagctaacaaaaaacggacaaataccacaatcattgcgctcctactgttcatttaaaatctattgtttatatgcaagaatatatagtattactgagatgaaagacaaactgttcccaaagcaaactcaatggctctcaattcttataaactgactctcaaaatgaacatgtgtagctgagtccatatttattggggacaatgtgcctgacagttttctgaactttcatgtagaatgcagcgtttagaaagcctaagaaataaaaatgtgcaaacttttgatttcacaggctcacacctggggggaatttgccaactacattattaaaacttaataatgtaattgaagtgtacaactatattactaaaacttaacagtaaccacaaatattgtttagaacttagacaaactatttttgtggagagtattattttattccttacattgtttagaatgatgagcacctggggatgatacaaaaaagcagatccttttttttttttttttttttgagacagagtctcactgtgttgcccaggctggagtgcagtggtgcaatctgggctcactccaacctctgcctcctgggttaagtgattctcgtgcctcagcaccccaagtagctgggactacaagcatgagccaccacacccaactaatttttgtatttttagtagagatggggtttcgccatgttggccaggctgcccttgaactcctggcctcatgtgatccgccagcctcggcctcccaaagtgctgggattacaggtgtgagccaccatacttggcaaaagcagattgtttttaaagttgttgtaatattgattttccactctctgaagacagtgcctcattacttgtatggaaggttctgactgtcacccagtgtgtccgctccctccaccttgagtccaccactgctttgctttataaagttgtatttcaatattatactaggtattttggagtgtagttttccaaaacctttttttttacagtgtatttttttttctctcacgcctcttcttagtatatcagaaatcttttgtttagtatttccaacttattaattgtcattcaggaagctgtatactgtttgatgagaactagacctatagataaatactgatttgtatttagcatgtatttgtacatttgtttaaaagaataatgccttttaaaaagtaagaatgaaagagattaaacagaagactgtggaagcattcccaacaattttttttcatatgtgtttgcatttgccaatcatggaaactaacttatcatatcctatctctctcatggaggcacaaagtaagaatccttcacaagagagctctctttttcttgtttcttcatcccagtaaataagtatgcatagatttttttttatacatttatcaggtttttttctagctggcaccccaaacagtgcccaggcagcatgatactatgcatgagtctgttttgatttgacactattgtattcttttcctctctataaaattaattcctgtatagcgtctgaataggtttttaaaaaaatcaattagcttttacttggaaaatcttttcctgtcttatatagaataatttttttttcatctgtcaagggggttattaataaatgccaccagtggggttagaacattctctggtgtttgctttaggggaacaaggggattgtcggaaatcctagccaaactgaaccataattagagagaaaatgttagcaattagaactatacgttaggctttaatttactaccacggaaaagtcaagggtggcatttctattccatttttaggtgcagccagatggattgctcattacagggtaatttccaccgaccctctgcacttctcagggtaacaaagcagctgacagtgctgtgcagcccagtggctcagattttattttattttttgtggaggtggagagtggggtaggaggttgagtagttatcaatttcctacatagtcactgacattactgggaatctttttacatgctgaataattttaggccaagaaagcagtttggtaacacaagtacatcaatataatttacttttctaccttgccctacatgtgttggttatactagcatattttagcaatcttcacattttaaagctcccctcttcagtgtttctaattttggtttttcctagtaaccaaaatgagcattttaagttgctgttaagaaaagaaactacacacagcgtctcacaccaaagtaatatagctgtaatctaattctaatctaattccagtaaagctttgaaggccacgaggtgatatatttttgacgatgcgggatacactttataattttttctttttatctcacaatcaaatgccatttctttgttacatgtcctatccaattttttttttaataaaatgaatttggtgccaacattgtaatgtaagtgtatttacttcagggttgcaacattttcatgggggaaataaatctacttactttatattatcatgagtcagaatcagtcacagtttcctttgattatgaaaatatagttggaagttcctttattatattttatttttttattgagataaaatacagagaacgtaaaatttaccattttaactgtttttaggtatacaattcagtggtgttagtacagtcacattgctgtgcaaacagcatcaccatccatcttcagaactttttcatcttccccaactgaaatgttgtatccattaaacaataactccccattctccccgtctccttagggaagtaccaggtaaaacaggactcatacaatatgtggccttttgtgcctggtttatttcacttgcatagtgtcatcagggtttatctatgttttcagtattgccttcccttttaaggctgaataatattcctttatatatgtatcataaagggaaagtacctttatttatttatttatttttgagacacagtttcgctcttgttgtccaggctggagtgcaatggcgcaatctcggctcactacaacctctgcctcctgggttcaagcgattctcttgtctcagcctccggagtagctgggattacaagcatacgccactatgcctggctcattttgtatttttagtagagatggggctttcacaatgttggccaggctggtctcgaactcctgacctcaggtgatccacctgcctctgcctcccaaagtgctgggattacaggcatgagccactgtgcctggctgaaaggtacctttattttaagtactttacacatatttcctaaggctgtagctccatactcaagtcttgtttgtactctgctatctgtagctattatctgtttaacaaagcctcgctggcctcaccacggttgatgttgctaataagaagacttggcatgttttgccccatgacgagtttgtcagaggcagttcagacaatgaacaaaggaaaatatccaatatttccattaaaaataccagttagagagcaaccatgtaaaactaatttttgagtcatgacatgcagagaaaagtagttaattgtattttcaggtaaatgttaagacaacattactaaaaacatttgcattcataattcattacagttatcaatggttgaaaaattcaaacaactaagcatcttaaattttctctttaaggatcagaaaaccagaaatattttccctgcattctatattatatcagactttagccaaaatttttcgtgcttctaatggaaaaatcatcaacacaaaaatcccgcacttttgtcaattgaagatattacggttccataacagtgtgacaaggtatttattcctcagaacatccatattatgtaaacaaaacattagtgaacgcttggtttttaaatgtttagatgctaaaacttttatattagactactctgcctgaagttaaagttagcctttcataggctaagttactaaaaaaaactctttccaagaaaggaatgagaaaattttatagaagaaaatttagaattatggtttaacaatctgtttaatatttttttttattcattagaaggggcaaacctgtaactcttcttttaaaaatagttctatctcaaagatatcaagccgggcgcggtggctcacgcctgtaatcccagcactttgggaggctgaggcgggcggatcacgaagtcaggagatcgagaccatcctggctaacatggtgaaaccccgtctgtactaaaaatacaaaaaaattagctgggcgtggtggtgggcgcctgtagtcccagctactcgcgaggctgaggcaggagaatggcgtgaacccgggaggcggagtttgcagtgagctgagatcgcgccactgcactccagagtgggcgacagagcgagactccgtctcaaaaaaaaaaaaaaaaatcagctttgtgctcctaccctttctgaccctagtctttctttttcgtcacagactgtattctcttccccgcttcctccccacaatttccttcttgctttccacaatcatttattaaatgagagcttagtatgtggcaggtgggacatttggagattcagagattaatatgacatgtttactgccttggaggagccccctgtaggtacaggtgtgtctggtaggtttttaattgtgtgtcctctctaatctactgcaactaagttcatggagtactgagttggtaagaaagggtaccaagatctattagtgatttctacctacggcctggcctgtagacagaatagttgacacacgtgtcgtgtctttgccaacccttagtccaagacagccacagctttttccaactccatttttttttctatccggtctctaaagttgagaactttaaaggatgctttaactatcactctagaacacttcaccttatatttccaccaagtgcctacccaatcaatccctaaatcatgttcaccattaccaattaatttttctctctcttttttttctaggctaccaagtcatgatggagaaaaacgtgaaaccactgattcagttcattgcaaattcattctaccaaaccttacctggctcttgttgctgcttggtagtccttttattaatctcttggagactcactgattagtttcctccattgatcatctaaaagcttttttcatatttttgaaactcactgtttgatctccccttccccttgtactcggaagatgatcttgctttctgctttactgagaagttcaaggttatctgcaatctccttcaacttttcactcctatcctattttctattttccttcatctcttgcttcctctgctcttttgttttagggaaagaaacagtccctttatttctaggttgaactcaacttctgcaggacttttgtctgtaaattgtacttctttttttttgagacagagtctcgctctgtcacccaggctggagtgcagtggcatgatctcaggtcactgcaacctctacctcccaggttaaagcaattctcctgcctcagcttcctgagtagctgggattacaggcgccactcccggctaaatttttgtatttttagtagagacggggtttggctatgttggccaggctggtctcaaattcctgacttcaggtgatgcacccacctccgcccgcctcggcctcccaaagtgctggcattacagatgtgagccaccgtgcccagctaaattgtaccttctgttccttaaaaatcctaaaatcccttgttgtaggttctttaattttgagaaagtaataaataaagcacagagattaataagacaaatatgcttgtttgcaaaacccagaattgactgttaatattatcatacactggcttatcctttttctaataaaaaagtttcagataaagttgaagttccccttgacctaccttttcagtcctgttgcctgcattccctccctcaaagcaaccctatataatatcggcatgtattctttgaggtcattaaagaatacatttatgtgcccatatacataataatgtgtgtgattgtttagtgggtaatttaagaatttacatatttaatattcacagtctattttgtgatgtttctgtcttctatccatgctagtatatgtagagctatttgtaagttccctgagggcagggactttgtcttgctcattgctgaatctccagcacctagaatagcatttggcatatagcaaacattcaatctttcttccttccttccttccttccttccttccttccttctttccttccttcctttctttctctctctctttttctttctttctttctttcttttctttctttctctctctttctctctccctctctccctctctcctttcctttctctttctttctttctttattcttcctttttttttgttgacaggatctcactctgtctcccaggctggagtgcattggcaccatcactgctcactgcaacctcctccttccaggctcaagcaatcctcccatttcagcctcccaagtggctgggactacaggagtgcaccaccttgcctggataattttttgtattttttttttggagagacagggtttcagcatgttgcccagactggtctcaaactcctttgctcaagtgttcctcctgccttggcctcccaaagtgctgggactatagatgtgagccactatgccagccaatatatgtatatatttcttaagtgagttaatatcattcatttttaactgctgtgtagtaatcaactgtatgaatattccacatatcacattttatttattcattctcccaccagtagacaatgtgtgctttcctaatttccatgcttcttattacaaatattgttgtggaacagccttgtacaagtctcctgtgcctatgtttgagttgtatcagagttggaattgctgcttgtcacaaataaactttaaactagatttagccaaattgcttttcaaagttttctggttttaaaacatgttcaagaatttctctccatatttttttccctttgagtgttctataccctgaaacaatagttttattctttctatcagtgttttaacttttcaagatgataatctatggccttaggatcttcatgcctgatgcttgaaagaactaacctttgacttttaagtgatattagccaacctccccttataaagataattaatgtataaatacatatgtgtatctgagaaaactatcactttgatcataaaattatttaaacaaaatttgactactataatgttgcttttatgtaactaattgcaaaccattttgttctataactacttaactatatatctttataaataaattttaagatcttcaagggcatagtttgtgtcttactcaacttcttatgtccatagcacctagaacgtaataaatggcacatgtatatggaaaaattataacaatttatatttacaatttcttttcacttcataataaaaagtatttaattttttttaagaagtaaatttcagaagatcatcttaagtggatgttctgtactttagctggtggtcttcagtctgccacacatgtaaccctcagaggtatggaagatgtttcaaggagtacccagtcatacaaagttttcagggagccagtttgcagttgatcctcaacttccatgtttaccctttcacacatttactgattttcttttttctttttctagcggtacgattccattcatagaaagtacaaaactacgtaaaactaatgtatgctgttacaaatcaggatgatgatacctttgtaagaagtggtagtgatgggaagggcttctgaggcgctggtagtgtctatttcctggccaagatgtattcaactgtacaaaattcatcaagctgtttatttgttatatggatgtgcatattaaactttgataatgagtttaaaatggtttgctagaaatcagaaatagaaaactttaagtattagatatctttgttttataagccacgggggaaactgatactcttatacatgactggtaggaattaaaaatggtgcagcctttatagaggggatttggcaaactgatcaaaattacaaatttgtttaccatttaccccttgacccaagaatcccaactgcggaaatgtgtcctaaagatatgcctgcatgtggaaccaatgtatatttacggtgatccattgcagcattatttataatggcagaacactgggaacaaccatatattcatcagcagctacttaaactctggtacatccacacagtagaatatgatggaactgttaaaaagaaggaagaagtgctgggtgtggtggctcatgcctataatcccagcactttgggaggctgaggcaggtggatcacgaggtcaagagatcgagaccatcctggccaacatggtgaaactccatctctactaaaaatacaaaaattagccaggcatggtggtg
